United States Patent Application Publication US 2022/0186216 A1 - sequence listing, part 3

SEQ ID NO: 39268 - DNA, 18 bp, Artificial Sequence
  Synthetic: FXN 3 reverse 9:69043185-69043206; SpCas9
acagctgaaataagaagg

SEQ ID NO: 39269 - DNA, 25 bp, Artificial Sequence
  Synthetic: FXN 3 reverse 9:69043181-69043209; SpCas9
ttacactatgacagctgaaataaga

SEQ ID NO: 39270 - DNA, 24 bp, Artificial Sequence
  Synthetic: FXN 3 reverse 9:69043182-69043209; SpCas9
tacactatgacagctgaaataaga

SEQ ID NO: 39271 - DNA, 23 bp, Artificial Sequence
  Synthetic: FXN 3 reverse 9:69043183-69043209; SpCas9
acactatgacagctgaaataaga

SEQ ID NO: 39272 - DNA, 22 bp, Artificial Sequence
  Synthetic: FXN 3 reverse 9:69043184-69043209; SpCas9
cactatgacagctgaaataaga

SEQ ID NO: 39273 - DNA, 21 bp, Artificial Sequence
  Synthetic: FXN 3 reverse 9:69043185-69043209; SpCas9
actatgacagctgaaataaga

SEQ ID NO: 39274 - DNA, 20 bp, Artificial Sequence
  Synthetic: FXN 3 reverse 9:69043186-69043209; SpCas9
ctatgacagctgaaataaga

SEQ ID NO: 39275 - DNA, 19 bp, Artificial Sequence
  Synthetic: FXN 3 reverse 9:69043187-69043209; SpCas9
tatgacagctgaaataaga

SEQ ID NO: 39276 - DNA, 18 bp, Artificial Sequence
  Synthetic: FXN 3 reverse 9:69043188-69043209; SpCas9
atgacagctgaaataaga

SEQ ID NO: 39277 - DNA, 25 bp, Artificial Sequence
  Synthetic: FXN 3 reverse 9:69043182-69043210; SpCas9
tttacactatgacagctgaaataag

SEQ ID NO: 39278 - DNA, 24 bp, Artificial Sequence
  Synthetic: FXN 3 reverse 9:69043183-69043210; SpCas9
ttacactatgacagctgaaataag

SEQ ID NO: 39279 - DNA, 23 bp, Artificial Sequence
  Synthetic: FXN 3 reverse 9:69043184-69043210; SpCas9
tacactatgacagctgaaataag

SEQ ID NO: 39280 - DNA, 22 bp, Artificial Sequence
  Synthetic: FXN 3 reverse 9:69043185-69043210; SpCas9
acactatgacagctgaaataag

SEQ ID NO: 39281 - DNA, 21 bp, Artificial Sequence
  Synthetic: FXN 3 reverse 9:69043186-69043210; SpCas9
cactatgacagctgaaataag

SEQ ID NO: 39282 - DNA, 20 bp, Artificial Sequence
  Synthetic: FXN 3 reverse 9:69043187-69043210; SpCas9
actatgacagctgaaataag

SEQ ID NO: 39283 - DNA, 19 bp, Artificial Sequence
  Synthetic: FXN 3 reverse 9:69043188-69043210; SpCas9
ctatgacagctgaaataag

SEQ ID NO: 39284 - DNA, 18 bp, Artificial Sequence
  Synthetic: FXN 3 reverse 9:69043189-69043210; SpCas9
tatgacagctgaaataag

SEQ ID NO: 39285 - DNA, 25 bp, Artificial Sequence
  Synthetic: FXN 3 reverse 9:69043185-69043213; SpCas9
cagtttacactatgacagctgaaat

SEQ ID NO: 39286 - DNA, 24 bp, Artificial Sequence
  Synthetic: FXN 3 reverse 9:69043186-69043213; SpCas9
agtttacactatgacagctgaaat

SEQ ID NO: 39287 - DNA, 23 bp, Artificial Sequence
  Synthetic: FXN 3 reverse 9:69043187-69043213; SpCas9
gtttacactatgacagctgaaat

SEQ ID NO: 39288 - DNA, 22 bp, Artificial Sequence
  Synthetic: FXN 3 reverse 9:69043188-69043213; SpCas9
tttacactatgacagctgaaat

SEQ ID NO: 39289 - DNA, 21 bp, Artificial Sequence
  Synthetic: FXN 3 reverse 9:69043189-69043213; SpCas9
ttacactatgacagctgaaat

SEQ ID NO: 39290 - DNA, 20 bp, Artificial Sequence
  Synthetic: FXN 3 reverse 9:69043190-69043213; SpCas9
tacactatgacagctgaaat

SEQ ID NO: 39291 - DNA, 19 bp, Artificial Sequence
  Synthetic: FXN 3 reverse 9:69043191-69043213; SpCas9
acactatgacagctgaaat

SEQ ID NO: 39292 - DNA, 18 bp, Artificial Sequence
  Synthetic: FXN 3 reverse 9:69043192-69043213; SpCas9
cactatgacagctgaaat

SEQ ID NO: 39293 - DNA, 25 bp, Artificial Sequence
  Synthetic: FXN 3 reverse 9:69043195-69043223; SpCas9
gaaaaggacacagtttacactatga

SEQ ID NO: 39294 - DNA, 24 bp, Artificial Sequence
  Synthetic: FXN 3 reverse 9:69043196-69043223; SpCas9
aaaaggacacagtttacactatga

SEQ ID NO: 39295 - DNA, 23 bp, Artificial Sequence
  Synthetic: FXN 3 reverse 9:69043197-69043223; SpCas9
aaaggacacagtttacactatga

SEQ ID NO: 39296 - DNA, 22 bp, Artificial Sequence
  Synthetic: FXN 3 reverse 9:69043198-69043223; SpCas9
aaggacacagtttacactatga

SEQ ID NO: 39297 - DNA, 21 bp, Artificial Sequence
  Synthetic: FXN 3 reverse 9:69043199-69043223; SpCas9
aggacacagtttacactatga

SEQ ID NO: 39298 - DNA, 20 bp, Artificial Sequence
  Synthetic: FXN 3 reverse 9:69043200-69043223; SpCas9
ggacacagtttacactatga

SEQ ID NO: 39299 - DNA, 19 bp, Artificial Sequence
  Synthetic: FXN 3 reverse 9:69043201-69043223; SpCas9
gacacagtttacactatga

SEQ ID NO: 39300 - DNA, 18 bp, Artificial Sequence
  Synthetic: FXN 3 reverse 9:69043202-69043223; SpCas9
acacagtttacactatga

SEQ ID NO: 39301 - DNA, 25 bp, Artificial Sequence
  Synthetic: FXN 3 forward 9:69043199-69043227; SpCas9
catagtgtaaactgtgtccttttca

SEQ ID NO: 39302 - DNA, 24 bp, Artificial Sequence
  Synthetic: FXN 3 forward 9:69043200-69043227; SpCas9
atagtgtaaactgtgtccttttca

SEQ ID NO: 39303 - DNA, 23 bp, Artificial Sequence
  Synthetic: FXN 3 forward 9:69043201-69043227; SpCas9
tagtgtaaactgtgtccttttca

SEQ ID NO: 39304 - DNA, 22 bp, Artificial Sequence
  Synthetic: FXN 3 forward 9:69043202-69043227; SpCas9
agtgtaaactgtgtccttttca

SEQ ID NO: 39305 - DNA, 21 bp, Artificial Sequence
  Synthetic: FXN 3 forward 9:69043203-69043227; SpCas9
gtgtaaactgtgtccttttca

SEQ ID NO: 39306 - DNA, 20 bp, Artificial Sequence
  Synthetic: FXN 3 forward 9:69043204-69043227; SpCas9
tgtaaactgtgtccttttca

SEQ ID NO: 39307 - DNA, 19 bp, Artificial Sequence
  Synthetic: FXN 3 forward 9:69043205-69043227; SpCas9
gtaaactgtgtccttttca

SEQ ID NO: 39308 - DNA, 18 bp, Artificial Sequence
  Synthetic: FXN 3 forward 9:69043206-69043227; SpCas9
taaactgtgtccttttca

SEQ ID NO: 39309 - DNA, 25 bp, Artificial Sequence
  Synthetic: FXN 3 forward 9:69043208-69043236; SpCas9
aactgtgtccttttcacagtctgat

SEQ ID NO: 39310 - DNA, 24 bp, Artificial Sequence
  Synthetic: FXN 3 forward 9:69043209-69043236; SpCas9
actgtgtccttttcacagtctgat

SEQ ID NO: 39311 - DNA, 23 bp, Artificial Sequence
  Synthetic: FXN 3 forward 9:69043210-69043236; SpCas9
ctgtgtccttttcacagtctgat

SEQ ID NO: 39312 - DNA, 22 bp, Artificial Sequence
  Synthetic: FXN 3 forward 9:69043211-69043236; SpCas9
tgtgtccttttcacagtctgat

SEQ ID NO: 39313 - DNA, 21 bp, Artificial Sequence
  Synthetic: FXN 3 forward 9:69043212-69043236; SpCas9
gtgtccttttcacagtctgat

SEQ ID NO: 39314 - DNA, 20 bp, Artificial Sequence
  Synthetic: FXN 3 forward 9:69043213-69043236; SpCas9
tgtccttttcacagtctgat

SEQ ID NO: 39315 - DNA, 19 bp, Artificial Sequence
  Synthetic: FXN 3 forward 9:69043214-69043236; SpCas9
gtccttttcacagtctgat

SEQ ID NO: 39316 - DNA, 18 bp, Artificial Sequence
  Synthetic: FXN 3 forward 9:69043215-69043236; SpCas9
tccttttcacagtctgat

SEQ ID NO: 39317 - DNA, 25 bp, Artificial Sequence
  Synthetic: FXN 3 reverse 9:69043210-69043238; SpCas9
cactaatcagactgtgaaaaggaca

SEQ ID NO: 39318 - DNA, 24 bp, Artificial Sequence
  Synthetic: FXN 3 reverse 9:69043211-69043238; SpCas9
actaatcagactgtgaaaaggaca

SEQ ID NO: 39319 - DNA, 23 bp, Artificial Sequence
  Synthetic: FXN 3 reverse 9:69043212-69043238; SpCas9
ctaatcagactgtgaaaaggaca

SEQ ID NO: 39320 - DNA, 22 bp, Artificial Sequence
  Synthetic: FXN 3 reverse 9:69043213-69043238; SpCas9
taatcagactgtgaaaaggaca

SEQ ID NO: 39321 - DNA, 21 bp, Artificial Sequence
  Synthetic: FXN 3 reverse 9:69043214-69043238; SpCas9
aatcagactgtgaaaaggaca

SEQ ID NO: 39322 - DNA, 20 bp, Artificial Sequence
  Synthetic: FXN 3 reverse 9:69043215-69043238; SpCas9
atcagactgtgaaaaggaca

SEQ ID NO: 39323 - DNA, 19 bp, Artificial Sequence
  Synthetic: FXN 3 reverse 9:69043216-69043238; SpCas9
tcagactgtgaaaaggaca

SEQ ID NO: 39324 - DNA, 18 bp, Artificial Sequence
  Synthetic: FXN 3 reverse 9:69043217-69043238; SpCas9
cagactgtgaaaaggaca

SEQ ID NO: 39325 - DNA, 25 bp, Artificial Sequence
  Synthetic: FXN 3 reverse 9:69043216-69043244; SpCas9
acatggcactaatcagactgtgaaa

SEQ ID NO: 39326 - DNA, 24 bp, Artificial Sequence
  Synthetic: FXN 3 reverse 9:69043217-69043244; SpCas9
catggcactaatcagactgtgaaa

SEQ ID NO: 39327 - DNA, 23 bp, Artificial Sequence
  Synthetic: FXN 3 reverse 9:69043218-69043244; SpCas9
atggcactaatcagactgtgaaa

SEQ ID NO: 39328 - DNA, 22 bp, Artificial Sequence
  Synthetic: FXN 3 reverse 9:69043219-69043244; SpCas9
tggcactaatcagactgtgaaa

SEQ ID NO: 39329 - DNA, 21 bp, Artificial Sequence
  Synthetic: FXN 3 reverse 9:69043220-69043244; SpCas9
ggcactaatcagactgtgaaa

SEQ ID NO: 39330 - DNA, 20 bp, Artificial Sequence
  Synthetic: FXN 3 reverse 9:69043221-69043244; SpCas9
gcactaatcagactgtgaaa

SEQ ID NO: 39331 - DNA, 19 bp, Artificial Sequence
  Synthetic: FXN 3 reverse 9:69043222-69043244; SpCas9
cactaatcagactgtgaaa

SEQ ID NO: 39332 - DNA, 18 bp, Artificial Sequence
  Synthetic: FXN 3 reverse 9:69043223-69043244; SpCas9
actaatcagactgtgaaa

SEQ ID NO: 39333 - DNA, 25 bp, Artificial Sequence
  Synthetic: FXN 3 reverse 9:69043217-69043245; SpCas9
aacatggcactaatcagactgtgaa

SEQ ID NO: 39334 - DNA, 24 bp, Artificial Sequence
  Synthetic: FXN 3 reverse 9:69043218-69043245; SpCas9
acatggcactaatcagactgtgaa

SEQ ID NO: 39335 - DNA, 23 bp, Artificial Sequence
  Synthetic: FXN 3 reverse 9:69043219-69043245; SpCas9
catggcactaatcagactgtgaa

SEQ ID NO: 39336 - DNA, 22 bp, Artificial Sequence
  Synthetic: FXN 3 reverse 9:69043220-69043245; SpCas9
atggcactaatcagactgtgaa

SEQ ID NO: 39337 - DNA, 21 bp, Artificial Sequence
  Synthetic: FXN 3 reverse 9:69043221-69043245; SpCas9
tggcactaatcagactgtgaa

SEQ ID NO: 39338 - DNA, 20 bp, Artificial Sequence
  Synthetic: FXN 3 reverse 9:69043222-69043245; SpCas9
ggcactaatcagactgtgaa

SEQ ID NO: 39339 - DNA, 19 bp, Artificial Sequence
  Synthetic: FXN 3 reverse 9:69043223-69043245; SpCas9
gcactaatcagactgtgaa

SEQ ID NO: 39340 - DNA, 18 bp, Artificial Sequence
  Synthetic: FXN 3 reverse 9:69043224-69043245; SpCas9
cactaatcagactgtgaa

SEQ ID NO: 39341 - DNA, 25 bp, Artificial Sequence
  Synthetic: FXN 3 forward 9:69043223-69043251; SpCas9
acagtctgattagtgccatgttttt

SEQ ID NO: 39342 - DNA, 24 bp, Artificial Sequence
  Synthetic: FXN 3 forward 9:69043224-69043251; SpCas9
cagtctgattagtgccatgttttt

SEQ ID NO: 39343 - DNA, 23 bp, Artificial Sequence
  Synthetic: FXN 3 forward 9:69043225-69043251; SpCas9
agtctgattagtgccatgttttt

SEQ ID NO: 39344 - DNA, 22 bp, Artificial Sequence
  Synthetic: FXN 3 forward 9:69043226-69043251; SpCas9
gtctgattagtgccatgttttt

SEQ ID NO: 39345 - DNA, 21 bp, Artificial Sequence
  Synthetic: FXN 3 forward 9:69043227-69043251; SpCas9
tctgattagtgccatgttttt

SEQ ID NO: 39346 - DNA, 20 bp, Artificial Sequence
  Synthetic: FXN 3 forward 9:69043228-69043251; SpCas9
ctgattagtgccatgttttt

SEQ ID NO: 39347 - DNA, 19 bp, Artificial Sequence
  Synthetic: FXN 3 forward 9:69043229-69043251; SpCas9
tgattagtgccatgttttt

SEQ ID NO: 39348 - DNA, 18 bp, Artificial Sequence
  Synthetic: FXN 3 forward 9:69043230-69043251; SpCas9
gattagtgccatgttttt

SEQ ID NO: 39349 - DNA, 25 bp, Artificial Sequence
  Synthetic: FXN 3 reverse 9:69043228-69043256; SpCas9
aaaatctgaaaaacatggcactaat

SEQ ID NO: 39350 - DNA, 24 bp, Artificial Sequence
  Synthetic: FXN 3 reverse 9:69043229-69043256; SpCas9
aaatctgaaaaacatggcactaat

SEQ ID NO: 39351 - DNA, 23 bp, Artificial Sequence
  Synthetic: FXN 3 reverse 9:69043230-69043256; SpCas9
aatctgaaaaacatggcactaat

SEQ ID NO: 39352 - DNA, 22 bp, Artificial Sequence
  Synthetic: FXN 3 reverse 9:69043231-69043256; SpCas9
atctgaaaaacatggcactaat

SEQ ID NO: 39353 - DNA, 21 bp, Artificial Sequence
  Synthetic: FXN 3 reverse 9:69043232-69043256; SpCas9
tctgaaaaacatggcactaat

SEQ ID NO: 39354 - DNA, 20 bp, Artificial Sequence
  Synthetic: FXN 3 reverse 9:69043233-69043256; SpCas9
ctgaaaaacatggcactaat

SEQ ID NO: 39355 - DNA, 19 bp, Artificial Sequence
  Synthetic: FXN 3 reverse 9:69043234-69043256; SpCas9
tgaaaaacatggcactaat

SEQ ID NO: 39356 - DNA, 18 bp, Artificial Sequence
  Synthetic: FXN 3 reverse 9:69043235-69043256; SpCas9
gaaaaacatggcactaat

SEQ ID NO: 39357 - DNA, 25 bp, Artificial Sequence
  Synthetic: FXN 3 reverse 9:69043238-69043266; SpCas9
aaaaagcataaaaatctgaaaaaca

SEQ ID NO: 39358 - DNA, 24 bp, Artificial Sequence
  Synthetic: FXN 3 reverse 9:69043239-69043266; SpCas9
aaaagcataaaaatctgaaaaaca

SEQ ID NO: 39359 - DNA, 23 bp, Artificial Sequence
  Synthetic: FXN 3 reverse 9:69043240-69043266; SpCas9
aaagcataaaaatctgaaaaaca

SEQ ID NO: 39360 - DNA, 22 bp, Artificial Sequence
  Synthetic: FXN 3 reverse 9:69043241-69043266; SpCas9
aagcataaaaatctgaaaaaca

SEQ ID NO: 39361 - DNA, 21 bp, Artificial Sequence
  Synthetic: FXN 3 reverse 9:69043242-69043266; SpCas9
agcataaaaatctgaaaaaca

SEQ ID NO: 39362 - DNA, 20 bp, Artificial Sequence
  Synthetic: FXN 3 reverse 9:69043243-69043266; SpCas9
gcataaaaatctgaaaaaca

SEQ ID NO: 39363 - DNA, 19 bp, Artificial Sequence
  Synthetic: FXN 3 reverse 9:69043244-69043266; SpCas9
cataaaaatctgaaaaaca

SEQ ID NO: 39364 - DNA, 18 bp, Artificial Sequence
  Synthetic: FXN 3 reverse 9:69043245-69043266; SpCas9
ataaaaatctgaaaaaca

SEQ ID NO: 39365 - DNA, 25 bp, Artificial Sequence
  Synthetic: FXN 3 forward 9:69043244-69043272; SpCas9
ttttcagatttttatgcttttttct

SEQ ID NO: 39366 - DNA, 24 bp, Artificial Sequence
  Synthetic: FXN 3 forward 9:69043245-69043272; SpCas9
tttcagatttttatgcttttttct

SEQ ID NO: 39367 - DNA, 23 bp, Artificial Sequence
  Synthetic: FXN 3 forward 9:69043246-69043272; SpCas9
ttcagatttttatgcttttttct

SEQ ID NO: 39368 - DNA, 22 bp, Artificial Sequence
  Synthetic: FXN 3 forward 9:69043247-69043272; SpCas9
tcagatttttatgcttttttct

SEQ ID NO: 39369 - DNA, 21 bp, Artificial Sequence
  Synthetic: FXN 3 forward 9:69043248-69043272; SpCas9
cagatttttatgcttttttct

SEQ ID NO: 39370 - DNA, 20 bp, Artificial Sequence
  Synthetic: FXN 3 forward 9:69043249-69043272; SpCas9
agatttttatgcttttttct

SEQ ID NO: 39371 - DNA, 19 bp, Artificial Sequence
  Synthetic: FXN 3 forward 9:69043250-69043272; SpCas9
gatttttatgcttttttct

SEQ ID NO: 39372 - DNA, 18 bp, Artificial Sequence
  Synthetic: FXN 3 forward 9:69043251-69043272; SpCas9
atttttatgcttttttct

SEQ ID NO: 39373 - DNA, 25 bp, Artificial Sequence
  Synthetic: FXN 3 reverse 9:69043260-69043288; SpCas9
tttaacagagaaataaccaagaaaa

SEQ ID NO: 39374 - DNA, 24 bp, Artificial Sequence
  Synthetic: FXN 3 reverse 9:69043261-69043288; SpCas9
ttaacagagaaataaccaagaaaa

SEQ ID NO: 39375 - DNA, 23 bp, Artificial Sequence
  Synthetic: FXN 3 reverse 9:69043262-69043288; SpCas9
taacagagaaataaccaagaaaa

SEQ ID NO: 39376 - DNA, 22 bp, Artificial Sequence
  Synthetic: FXN 3 reverse 9:69043263-69043288; SpCas9
aacagagaaataaccaagaaaa

SEQ ID NO: 39377 - DNA, 21 bp, Artificial Sequence
  Synthetic: FXN 3 reverse 9:69043264-69043288; SpCas9
acagagaaataaccaagaaaa

SEQ ID NO: 39378 - DNA, 20 bp, Artificial Sequence
  Synthetic: FXN 3 reverse 9:69043265-69043288; SpCas9
cagagaaataaccaagaaaa

SEQ ID NO: 39379 - DNA, 19 bp, Artificial Sequence
  Synthetic: FXN 3 reverse 9:69043266-69043288; SpCas9
agagaaataaccaagaaaa

SEQ ID NO: 39380 - DNA, 18 bp, Artificial Sequence
  Synthetic: FXN 3 reverse 9:69043267-69043288; SpCas9
gagaaataaccaagaaaa

SEQ ID NO: 39381 - DNA, 25 bp, Artificial Sequence
  Synthetic: FXN 3 reverse 9:69043267-69043295; SpCas9
agacaattttaacagagaaataacc

SEQ ID NO: 39382 - DNA, 24 bp, Artificial Sequence
  Synthetic: FXN 3 reverse 9:69043268-69043295; SpCas9
gacaattttaacagagaaataacc

SEQ ID NO: 39383 - DNA, 23 bp, Artificial Sequence
  Synthetic: FXN 3 reverse 9:69043269-69043295; SpCas9
acaattttaacagagaaataacc

SEQ ID NO: 39384 - DNA, 22 bp, Artificial Sequence
  Synthetic: FXN 3 reverse 9:69043270-69043295; SpCas9
caattttaacagagaaataacc

SEQ ID NO: 39385 - DNA, 21 bp, Artificial Sequence
  Synthetic: FXN 3 reverse 9:69043271-69043295; SpCas9
aattttaacagagaaataacc

SEQ ID NO: 39386 - DNA, 20 bp, Artificial Sequence
  Synthetic: FXN 3 reverse 9:69043272-69043295; SpCas9
attttaacagagaaataacc

SEQ ID NO: 39387 - DNA, 19 bp, Artificial Sequence
  Synthetic: FXN 3 reverse 9:69043273-69043295; SpCas9
ttttaacagagaaataacc

SEQ ID NO: 39388 - DNA, 18 bp, Artificial Sequence
  Synthetic: FXN 3 reverse 9:69043274-69043295; SpCas9
tttaacagagaaataacc

SEQ ID NO: 39389 - DNA, 25 bp, Artificial Sequence
  Synthetic: FXN 3 forward 9:69043272-69043300; SpCas9
ttatttctctgttaaaattgtctcc

SEQ ID NO: 39390 - DNA, 24 bp, Artificial Sequence
  Synthetic: FXN 3 forward 9:69043273-69043300; SpCas9
tatttctctgttaaaattgtctcc

SEQ ID NO: 39391 - DNA, 23 bp, Artificial Sequence
  Synthetic: FXN 3 forward 9:69043274-69043300; SpCas9
atttctctgttaaaattgtctcc

SEQ ID NO: 39392 - DNA, 22 bp, Artificial Sequence
  Synthetic: FXN 3 forward 9:69043275-69043300; SpCas9
tttctctgttaaaattgtctcc

SEQ ID NO: 39393 - DNA, 21 bp, Artificial Sequence
  Synthetic: FXN 3 forward 9:69043276-69043300; SpCas9
ttctctgttaaaattgtctcc

SEQ ID NO: 39394 - DNA, 20 bp, Artificial Sequence
  Synthetic: FXN 3 forward 9:69043277-69043300; SpCas9
tctctgttaaaattgtctcc

SEQ ID NO: 39395 - DNA, 19 bp, Artificial Sequence
  Synthetic: FXN 3 forward 9:69043278-69043300; SpCas9
ctctgttaaaattgtctcc

SEQ ID NO: 39396 - DNA, 18 bp, Artificial Sequence
  Synthetic: FXN 3 forward 9:69043279-69043300; SpCas9
tctgttaaaattgtctcc

SEQ ID NO: 39397 - DNA, 25 bp, Artificial Sequence
  Synthetic: FXN 3 forward 9:69043277-69043305; SpCas9
tctctgttaaaattgtctccaagtg

SEQ ID NO: 39398 - DNA, 24 bp, Artificial Sequence
  Synthetic: FXN 3 forward 9:69043278-69043305; SpCas9
ctctgttaaaattgtctccaagtg

SEQ ID NO: 39399 - DNA, 23 bp, Artificial Sequence
  Synthetic: FXN 3 forward 9:69043279-69043305; SpCas9
tctgttaaaattgtctccaagtg

SEQ ID NO: 39400 - DNA, 22 bp, Artificial Sequence
  Synthetic: FXN 3 forward 9:69043280-69043305; SpCas9
ctgttaaaattgtctccaagtg

SEQ ID NO: 39401 - DNA, 21 bp, Artificial Sequence
  Synthetic: FXN 3 forward 9:69043281-69043305; SpCas9
tgttaaaattgtctccaagtg

SEQ ID NO: 39402 - DNA, 20 bp, Artificial Sequence
  Synthetic: FXN 3 forward 9:69043282-69043305; SpCas9
gttaaaattgtctccaagtg

SEQ ID NO: 39403 - DNA, 19 bp, Artificial Sequence
  Synthetic: FXN 3 forward 9:69043283-69043305; SpCas9
ttaaaattgtctccaagtg

SEQ ID NO: 39404 - DNA, 18 bp, Artificial Sequence
  Synthetic: FXN 3 forward 9:69043284-69043305; SpCas9
taaaattgtctccaagtg

SEQ ID NO: 39405 - DNA, 25 bp, Artificial Sequence
  Synthetic: FXN 3 reverse 9:69043278-69043306; SpCas9
actacacttggagacaattttaaca

SEQ ID NO: 39406 - DNA, 24 bp, Artificial Sequence
  Synthetic: FXN 3 reverse 9:69043279-69043306; SpCas9
ctacacttggagacaattttaaca

SEQ ID NO: 39407 - DNA, 23 bp, Artificial Sequence
  Synthetic: FXN 3 reverse 9:69043280-69043306; SpCas9
tacacttggagacaattttaaca

SEQ ID NO: 39408 - DNA, 22 bp, Artificial Sequence
  Synthetic: FXN 3 reverse 9:69043281-69043306; SpCas9
acacttggagacaattttaaca

SEQ ID NO: 39409 - DNA, 21 bp, Artificial Sequence
  Synthetic: FXN 3 reverse 9:69043282-69043306; SpCas9
cacttggagacaattttaaca

SEQ ID NO: 39410 - DNA, 20 bp, Artificial Sequence
  Synthetic: FXN 3 reverse 9:69043283-69043306; SpCas9
acttggagacaattttaaca

SEQ ID NO: 39411 - DNA, 19 bp, Artificial Sequence
  Synthetic: FXN 3 reverse 9:69043284-69043306; SpCas9
cttggagacaattttaaca

SEQ ID NO: 39412 - DNA, 18 bp, Artificial Sequence
  Synthetic: FXN 3 reverse 9:69043285-69043306; SpCas9
ttggagacaattttaaca

SEQ ID NO: 39413 - DNA, 25 bp, Artificial Sequence
  Synthetic: FXN 3 reverse 9:69043280-69043308; SpCas9
gcactacacttggagacaattttaa

SEQ ID NO: 39414 - DNA, 24 bp, Artificial Sequence
  Synthetic: FXN 3 reverse 9:69043281-69043308; SpCas9
cactacacttggagacaattttaa

SEQ ID NO: 39415 - DNA, 23 bp, Artificial Sequence
  Synthetic: FXN 3 reverse 9:69043282-69043308; SpCas9
actacacttggagacaattttaa

SEQ ID NO: 39416 - DNA, 22 bp, Artificial Sequence
  Synthetic: FXN 3 reverse 9:69043283-69043308; SpCas9
ctacacttggagacaattttaa

SEQ ID NO: 39417 - DNA, 21 bp, Artificial Sequence
  Synthetic: FXN 3 reverse 9:69043284-69043308; SpCas9
tacacttggagacaattttaa

SEQ ID NO: 39418 - DNA, 20 bp, Artificial Sequence
  Synthetic: FXN 3 reverse 9:69043285-69043308; SpCas9
acacttggagacaattttaa

SEQ ID NO: 39419 - DNA, 19 bp, Artificial Sequence
  Synthetic: FXN 3 reverse 9:69043286-69043308; SpCas9
cacttggagacaattttaa

SEQ ID NO: 39420 - DNA, 18 bp, Artificial Sequence
  Synthetic: FXN 3 reverse 9:69043287-69043308; SpCas9
acttggagacaattttaa

SEQ ID NO: 39421 - DNA, 25 bp, Artificial Sequence
  Synthetic: FXN 3 forward 9:69043284-69043312; SpCas9
taaaattgtctccaagtgtagtgca

SEQ ID NO: 39422 - DNA, 24 bp, Artificial Sequence
  Synthetic: FXN 3 forward 9:69043285-69043312; SpCas9
aaaattgtctccaagtgtagtgca

SEQ ID NO: 39423 - DNA, 23 bp, Artificial Sequence
  Synthetic: FXN 3 forward 9:69043286-69043312; SpCas9
aaattgtctccaagtgtagtgca

SEQ ID NO: 39424 - DNA, 22 bp, Artificial Sequence
  Synthetic: FXN 3 forward 9:69043287-69043312; SpCas9
aattgtctccaagtgtagtgca

SEQ ID NO: 39425 - DNA, 21 bp, Artificial Sequence
  Synthetic: FXN 3 forward 9:69043288-69043312; SpCas9
attgtctccaagtgtagtgca

SEQ ID NO: 39426 - DNA, 20 bp, Artificial Sequence
  Synthetic: FXN 3 forward 9:69043289-69043312; SpCas9
ttgtctccaagtgtagtgca

SEQ ID NO: 39427 - DNA, 19 bp, Artificial Sequence
  Synthetic: FXN 3 forward 9:69043290-69043312; SpCas9
tgtctccaagtgtagtgca

SEQ ID NO: 39428 - DNA, 18 bp, Artificial Sequence
  Synthetic: FXN 3 forward 9:69043291-69043312; SpCas9
gtctccaagtgtagtgca

SEQ ID NO: 39429 - DNA, 25 bp, Artificial Sequence
  Synthetic: FXN 3 forward 9:69043289-69043317; SpCas9
ttgtctccaagtgtagtgcaaagtt

SEQ ID NO: 39430 - DNA, 24 bp, Artificial Sequence
  Synthetic: FXN 3 forward 9:69043290-69043317; SpCas9
tgtctccaagtgtagtgcaaagtt

SEQ ID NO: 39431 - DNA, 23 bp, Artificial Sequence
  Synthetic: FXN 3 forward 9:69043291-69043317; SpCas9
gtctccaagtgtagtgcaaagtt

SEQ ID NO: 39432 - DNA, 22 bp, Artificial Sequence
  Synthetic: FXN 3 forward 9:69043292-69043317; SpCas9
tctccaagtgtagtgcaaagtt

SEQ ID NO: 39433 - DNA, 21 bp, Artificial Sequence
  Synthetic: FXN 3 forward 9:69043293-69043317; SpCas9
ctccaagtgtagtgcaaagtt

SEQ ID NO: 39434 - DNA, 20 bp, Artificial Sequence
  Synthetic: FXN 3 forward 9:69043294-69043317; SpCas9
tccaagtgtagtgcaaagtt

SEQ ID NO: 39435 - DNA, 19 bp, Artificial Sequence
  Synthetic: FXN 3 forward 9:69043295-69043317; SpCas9
ccaagtgtagtgcaaagtt

SEQ ID NO: 39436 - DNA, 18 bp, Artificial Sequence
  Synthetic: FXN 3 forward 9:69043296-69043317; SpCas9
caagtgtagtgcaaagtt

SEQ ID NO: 39437 - DNA, 25 bp, Artificial Sequence
  Synthetic: FXN 3 reverse 9:69043293-69043321; SpCas9
cgtgctaaactttgcactacacttg

SEQ ID NO: 39438 - DNA, 24 bp, Artificial Sequence
  Synthetic: FXN 3 reverse 9:69043294-69043321; SpCas9
gtgctaaactttgcactacacttg

SEQ ID NO: 39439 - DNA, 23 bp, Artificial Sequence
  Synthetic: FXN 3 reverse 9:69043295-69043321; SpCas9
tgctaaactttgcactacacttg

SEQ ID NO: 39440 - DNA, 22 bp, Artificial Sequence
  Synthetic: FXN 3 reverse 9:69043296-69043321; SpCas9
gctaaactttgcactacacttg

SEQ ID NO: 39441 - DNA, 21 bp, Artificial Sequence
  Synthetic: FXN 3 reverse 9:69043297-69043321; SpCas9
ctaaactttgcactacacttg

SEQ ID NO: 39442 - DNA, 20 bp, Artificial Sequence
  Synthetic: FXN 3 reverse 9:69043298-69043321; SpCas9
taaactttgcactacacttg

SEQ ID NO: 39443 - DNA, 19 bp, Artificial Sequence
  Synthetic: FXN 3 reverse 9:69043299-69043321; SpCas9
aaactttgcactacacttg

SEQ ID NO: 39444 - DNA, 18 bp, Artificial Sequence
  Synthetic: FXN 3 reverse 9:69043300-69043321; SpCas9
aactttgcactacacttg

SEQ ID NO: 39445 - DNA, 25 bp, Artificial Sequence
  Synthetic: FXN 3 forward 9:69043295-69043323; SpCas9
ccaagtgtagtgcaaagtttagcac

SEQ ID NO: 39446 - DNA, 24 bp, Artificial Sequence
  Synthetic: FXN 3 forward 9:69043296-69043323; SpCas9
caagtgtagtgcaaagtttagcac

SEQ ID NO: 39447 - DNA, 23 bp, Artificial Sequence
  Synthetic: FXN 3 forward 9:69043297-69043323; SpCas9
aagtgtagtgcaaagtttagcac

SEQ ID NO: 39448 - DNA, 22 bp, Artificial Sequence
  Synthetic: FXN 3 forward 9:69043298-69043323; SpCas9
agtgtagtgcaaagtttagcac

SEQ ID NO: 39449 - DNA, 21 bp, Artificial Sequence
  Synthetic: FXN 3 forward 9:69043299-69043323; SpCas9
gtgtagtgcaaagtttagcac

SEQ ID NO: 39450 - DNA, 20 bp, Artificial Sequence
  Synthetic: FXN 3 forward 9:69043300-69043323; SpCas9
tgtagtgcaaagtttagcac

SEQ ID NO: 39451 - DNA, 19 bp, Artificial Sequence
  Synthetic: FXN 3 forward 9:69043301-69043323; SpCas9
gtagtgcaaagtttagcac

SEQ ID NO: 39452 - DNA, 18 bp, Artificial Sequence
  Synthetic: FXN 3 forward 9:69043302-69043323; SpCas9
tagtgcaaagtttagcac

SEQ ID NO: 39453 - DNA, 25 bp, Artificial Sequence
  Synthetic: FXN 3 reverse 9:69043295-69043323; SpCas9
ctcgtgctaaactttgcactacact

SEQ ID NO: 39454 - DNA, 24 bp, Artificial Sequence
  Synthetic: FXN 3 reverse 9:69043296-69043323; SpCas9
tcgtgctaaactttgcactacact

SEQ ID NO: 39455 - DNA, 23 bp, Artificial Sequence
  Synthetic: FXN 3 reverse 9:69043297-69043323; SpCas9
cgtgctaaactttgcactacact

SEQ ID NO: 39456 - DNA, 22 bp, Artificial Sequence
  Synthetic: FXN 3 reverse 9:69043298-69043323; SpCas9
gtgctaaactttgcactacact

SEQ ID NO: 39457 - DNA, 21 bp, Artificial Sequence
  Synthetic: FXN 3 reverse 9:69043299-69043323; SpCas9
tgctaaactttgcactacact

SEQ ID NO: 39458 - DNA, 20 bp, Artificial Sequence
  Synthetic: FXN 3 reverse 9:69043300-69043323; SpCas9
gctaaactttgcactacact

SEQ ID NO: 39459 - DNA, 19 bp, Artificial Sequence
  Synthetic: FXN 3 reverse 9:69043301-69043323; SpCas9
ctaaactttgcactacact

SEQ ID NO: 39460 - DNA, 18 bp, Artificial Sequence
  Synthetic: FXN 3 reverse 9:69043302-69043323; SpCas9
taaactttgcactacact

SEQ ID NO: 39461 - DNA, 25 bp, Artificial Sequence
  Synthetic: FXN 3 forward 9:69043296-69043324; SpCas9
caagtgtagtgcaaagtttagcacg

SEQ ID NO: 39462 - DNA, 24 bp, Artificial Sequence
  Synthetic: FXN 3 forward 9:69043297-69043324; SpCas9
aagtgtagtgcaaagtttagcacg

SEQ ID NO: 39463 - DNA, 23 bp, Artificial Sequence
  Synthetic: FXN 3 forward 9:69043298-69043324; SpCas9
agtgtagtgcaaagtttagcacg

SEQ ID NO: 39464 - DNA, 22 bp, Artificial Sequence
  Synthetic: FXN 3 forward 9:69043299-69043324; SpCas9
gtgtagtgcaaagtttagcacg

SEQ ID NO: 39465 - DNA, 21 bp, Artificial Sequence
  Synthetic: FXN 3 forward 9:69043300-69043324; SpCas9
tgtagtgcaaagtttagcacg

SEQ ID NO: 39466 - DNA, 20 bp, Artificial Sequence
  Synthetic: FXN 3 forward 9:69043301-69043324; SpCas9
gtagtgcaaagtttagcacg

SEQ ID NO: 39467 - DNA, 19 bp, Artificial Sequence
  Synthetic: FXN 3 forward 9:69043302-69043324; SpCas9
tagtgcaaagtttagcacg

SEQ ID NO: 39468 - DNA, 18 bp, Artificial Sequence
  Synthetic: FXN 3 forward 9:69043303-69043324; SpCas9
agtgcaaagtttagcacg

SEQ ID NO: 39469 - DNA, 25 bp, Artificial Sequence
  Synthetic: FXN 3 forward 9:69043298-69043326; SpCas9
agtgtagtgcaaagtttagcacgag

SEQ ID NO: 39470 - DNA, 24 bp, Artificial Sequence
  Synthetic: FXN 3 forward 9:69043299-69043326; SpCas9
gtgtagtgcaaagtttagcacgag

SEQ ID NO: 39471 - DNA, 23 bp, Artificial Sequence
  Synthetic: FXN 3 forward 9:69043300-69043326; SpCas9
tgtagtgcaaagtttagcacgag

SEQ ID NO: 39472 - DNA, 22 bp, Artificial Sequence
  Synthetic: FXN 3 forward 9:69043301-69043326; SpCas9
gtagtgcaaagtttagcacgag

SEQ ID NO: 39473 - DNA, 21 bp, Artificial Sequence
  Synthetic: FXN 3 forward 9:69043302-69043326; SpCas9
tagtgcaaagtttagcacgag

SEQ ID NO: 39474 - DNA, 20 bp, Artificial Sequence
  Synthetic: FXN 3 forward 9:69043303-69043326; SpCas9
agtgcaaagtttagcacgag

SEQ ID NO: 39475 - DNA, 19 bp, Artificial Sequence
  Synthetic: FXN 3 forward 9:69043304-69043326; SpCas9
gtgcaaagtttagcacgag

SEQ ID NO: 39476 - DNA, 18 bp, Artificial Sequence
  Synthetic: FXN 3 forward 9:69043305-69043326; SpCas9
tgcaaagtttagcacgag

SEQ ID NO: 39477 - DNA, 25 bp, Artificial Sequence
  Synthetic: FXN 3 forward 9:69043299-69043327; SpCas9
gtgtagtgcaaagtttagcacgagg

SEQ ID NO: 39478 - DNA, 24 bp, Artificial Sequence
  Synthetic: FXN 3 forward 9:69043300-69043327; SpCas9
tgtagtgcaaagtttagcacgagg

SEQ ID NO: 39479 - DNA, 23 bp, Artificial Sequence
  Synthetic: FXN 3 forward 9:69043301-69043327; SpCas9
gtagtgcaaagtttagcacgagg

SEQ ID NO: 39480 - DNA, 22 bp, Artificial Sequence
  Synthetic: FXN 3 forward 9:69043302-69043327; SpCas9
tagtgcaaagtttagcacgagg

SEQ ID NO: 39481 - DNA, 21 bp, Artificial Sequence
  Synthetic: FXN 3 forward 9:69043303-69043327; SpCas9
agtgcaaagtttagcacgagg

SEQ ID NO: 39482 - DNA, 20 bp, Artificial Sequence
  Synthetic: FXN 3 forward 9:69043304-69043327; SpCas9
gtgcaaagtttagcacgagg

SEQ ID NO: 39483 - DNA, 19 bp, Artificial Sequence
  Synthetic: FXN 3 forward 9:69043305-69043327; SpCas9
tgcaaagtttagcacgagg

SEQ ID NO: 39484 - DNA, 18 bp, Artificial Sequence
  Synthetic: FXN 3 forward 9:69043306-69043327; SpCas9
gcaaagtttagcacgagg

SEQ ID NO: 39485 - DNA, 25 bp, Artificial Sequence
  Synthetic: FXN 3 forward 9:69043317-69043345; SpCas9
cacgaggaggctgtgatgttcctta

SEQ ID NO: 39486 - DNA, 24 bp, Artificial Sequence
  Synthetic: FXN 3 forward 9:69043318-69043345; SpCas9
acgaggaggctgtgatgttcctta

SEQ ID NO: 39487 - DNA, 23 bp, Artificial Sequence
  Synthetic: FXN 3 forward 9:69043319-69043345; SpCas9
cgaggaggctgtgatgttcctta

SEQ ID NO: 39488 - DNA, 22 bp, Artificial Sequence
  Synthetic: FXN 3 forward 9:69043320-69043345; SpCas9
gaggaggctgtgatgttcctta

SEQ ID NO: 39489 - DNA, 21 bp, Artificial Sequence
  Synthetic: FXN 3 forward 9:69043321-69043345; SpCas9
aggaggctgtgatgttcctta

SEQ ID NO: 39490 - DNA, 20 bp, Artificial Sequence
  Synthetic: FXN 3 forward 9:69043322-69043345; SpCas9
ggaggctgtgatgttcctta

SEQ ID NO: 39491 - DNA, 19 bp, Artificial Sequence
  Synthetic: FXN 3 forward 9:69043323-69043345; SpCas9
gaggctgtgatgttcctta

SEQ ID NO: 39492 - DNA, 18 bp, Artificial Sequence
  Synthetic: FXN 3 forward 9:69043324-69043345; SpCas9
aggctgtgatgttcctta

SEQ ID NO: 39493 - DNA, 25 bp, Artificial Sequence
  Synthetic: FXN 3 forward 9:69043319-69043347; SpCas9
cgaggaggctgtgatgttccttaca

SEQ ID NO: 39494 - DNA, 24 bp, Artificial Sequence
  Synthetic: FXN 3 forward 9:69043320-69043347; SpCas9
gaggaggctgtgatgttccttaca

SEQ ID NO: 39495 - DNA, 23 bp, Artificial Sequence
  Synthetic: FXN 3 forward 9:69043321-69043347; SpCas9
aggaggctgtgatgttccttaca

SEQ ID NO: 39496 - DNA, 22 bp, Artificial Sequence
  Synthetic: FXN 3 forward 9:69043322-69043347; SpCas9
ggaggctgtgatgttccttaca

SEQ ID NO: 39497 - DNA, 21 bp, Artificial Sequence
  Synthetic: FXN 3 forward 9:69043323-69043347; SpCas9
gaggctgtgatgttccttaca

SEQ ID NO: 39498 - DNA, 20 bp, Artificial Sequence
  Synthetic: FXN 3 forward 9:69043324-69043347; SpCas9
aggctgtgatgttccttaca

SEQ ID NO: 39499 - DNA, 19 bp, Artificial Sequence
  Synthetic: FXN 3 forward 9:69043325-69043347; SpCas9
ggctgtgatgttccttaca

SEQ ID NO: 39500 - DNA, 18 bp, Artificial Sequence
  Synthetic: FXN 3 forward 9:69043326-69043347; SpCas9
gctgtgatgttccttaca

SEQ ID NO: 39501 - DNA, 25 bp, Artificial Sequence
  Synthetic: FXN 3 reverse 9:69043327-69043355; SpCas9
tgcattttctctgtaaggaacatca

SEQ ID NO: 39502 - DNA, 24 bp, Artificial Sequence
  Synthetic: FXN 3 reverse 9:69043328-69043355; SpCas9
gcattttctctgtaaggaacatca

SEQ ID NO: 39503 - DNA, 23 bp, Artificial Sequence
  Synthetic: FXN 3 reverse 9:69043329-69043355; SpCas9
cattttctctgtaaggaacatca

SEQ ID NO: 39504 - DNA, 22 bp, Artificial Sequence
  Synthetic: FXN 3 reverse 9:69043330-69043355; SpCas9
attttctctgtaaggaacatca

SEQ ID NO: 39505 - DNA, 21 bp, Artificial Sequence
  Synthetic: FXN 3 reverse 9:69043331-69043355; SpCas9
ttttctctgtaaggaacatca

SEQ ID NO: 39506 - DNA, 20 bp, Artificial Sequence
  Synthetic: FXN 3 reverse 9:69043332-69043355; SpCas9
tttctctgtaaggaacatca

SEQ ID NO: 39507 - DNA, 19 bp, Artificial Sequence
  Synthetic: FXN 3 reverse 9:69043333-69043355; SpCas9
ttctctgtaaggaacatca

SEQ ID NO: 39508 - DNA, 18 bp, Artificial Sequence
  Synthetic: FXN 3 reverse 9:69043334-69043355; SpCas9
tctctgtaaggaacatca

SEQ ID NO: 39509 - DNA, 25 bp, Artificial Sequence
  Synthetic: FXN 3 forward 9:69043335-69043363; SpCas9
ttccttacagagaaaatgcatgtgt

SEQ ID NO: 39510 - DNA, 24 bp, Artificial Sequence
  Synthetic: FXN 3 forward 9:69043336-69043363; SpCas9
tccttacagagaaaatgcatgtgt

SEQ ID NO: 39511 - DNA, 23 bp, Artificial Sequence
  Synthetic: FXN 3 forward 9:69043337-69043363; SpCas9
ccttacagagaaaatgcatgtgt

SEQ ID NO: 39512 - DNA, 22 bp, Artificial Sequence
  Synthetic: FXN 3 forward 9:69043338-69043363; SpCas9
cttacagagaaaatgcatgtgt

SEQ ID NO: 39513 - DNA, 21 bp, Artificial Sequence
  Synthetic: FXN 3 forward 9:69043339-69043363; SpCas9
ttacagagaaaatgcatgtgt

SEQ ID NO: 39514 - DNA, 20 bp, Artificial Sequence
  Synthetic: FXN 3 forward 9:69043340-69043363; SpCas9
tacagagaaaatgcatgtgt

SEQ ID NO: 39515 - DNA, 19 bp, Artificial Sequence
  Synthetic: FXN 3 forward 9:69043341-69043363; SpCas9
acagagaaaatgcatgtgt

SEQ ID NO: 39516 - DNA, 18 bp, Artificial Sequence
  Synthetic: FXN 3 forward 9:69043342-69043363; SpCas9
cagagaaaatgcatgtgt

SEQ ID NO: 39517 - DNA, 25 bp, Artificial Sequence
  Synthetic: FXN 3 forward 9:69043337-69043365; SpCas9
ccttacagagaaaatgcatgtgtta

SEQ ID NO: 39518 - DNA, 24 bp, Artificial Sequence
  Synthetic: FXN 3 forward 9:69043338-69043365; SpCas9
cttacagagaaaatgcatgtgtta

SEQ ID NO: 39519 - DNA, 23 bp, Artificial Sequence
  Synthetic: FXN 3 forward 9:69043339-69043365; SpCas9
ttacagagaaaatgcatgtgtta

SEQ ID NO: 39520 - DNA, 22 bp, Artificial Sequence
  Synthetic: FXN 3 forward 9:69043340-69043365; SpCas9
tacagagaaaatgcatgtgtta

SEQ ID NO: 39521 - DNA, 21 bp, Artificial Sequence
  Synthetic: FXN 3 forward 9:69043341-69043365; SpCas9
acagagaaaatgcatgtgtta

SEQ ID NO: 39522 - DNA, 20 bp, Artificial Sequence
  Synthetic: FXN 3 forward 9:69043342-69043365; SpCas9
cagagaaaatgcatgtgtta

SEQ ID NO: 39523 - DNA, 19 bp, Artificial Sequence
  Synthetic: FXN 3 forward 9:69043343-69043365; SpCas9
agagaaaatgcatgtgtta

SEQ ID NO: 39524 - DNA, 18 bp, Artificial Sequence
  Synthetic: FXN 3 forward 9:69043344-69043365; SpCas9
gagaaaatgcatgtgtta

SEQ ID NO: 39525 - DNA, 25 bp, Artificial Sequence
  Synthetic: FXN 3 reverse 9:69043337-69043365; SpCas9
ctctaacacatgcattttctctgta

SEQ ID NO: 39526 - DNA, 24 bp, Artificial Sequence
  Synthetic: FXN 3 reverse 9:69043338-69043365; SpCas9
tctaacacatgcattttctctgta

SEQ ID NO: 39527 - DNA, 23 bp, Artificial Sequence
  Synthetic: FXN 3 reverse 9:69043339-69043365; SpCas9
ctaacacatgcattttctctgta

SEQ ID NO: 39528 - DNA, 22 bp, Artificial Sequence
  Synthetic: FXN 3 reverse 9:69043340-69043365; SpCas9
taacacatgcattttctctgta

SEQ ID NO: 39529 - DNA, 21 bp, Artificial Sequence
  Synthetic: FXN 3 reverse 9:69043341-69043365; SpCas9
aacacatgcattttctctgta

SEQ ID NO: 39530 - DNA, 20 bp, Artificial Sequence
  Synthetic: FXN 3 reverse 9:69043342-69043365; SpCas9
acacatgcattttctctgta

SEQ ID NO: 39531 - DNA, 19 bp, Artificial Sequence
  Synthetic: FXN 3 reverse 9:69043343-69043365; SpCas9
cacatgcattttctctgta

SEQ ID NO: 39532 - DNA, 18 bp, Artificial Sequence
  Synthetic: FXN 3 reverse 9:69043344-69043365; SpCas9
acatgcattttctctgta

SEQ ID NO: 39533 - DNA, 25 bp, Artificial Sequence
  Synthetic: FXN 3 reverse 9:69043338-69043366; SpCas9
tctctaacacatgcattttctctgt

SEQ ID NO: 39534 - DNA, 24 bp, Artificial Sequence
  Synthetic: FXN 3 reverse 9:69043339-69043366; SpCas9
ctctaacacatgcattttctctgt

SEQ ID NO: 39535 - DNA, 23 bp, Artificial Sequence
  Synthetic: FXN 3 reverse 9:69043340-69043366; SpCas9
tctaacacatgcattttctctgt

SEQ ID NO: 39536 - DNA, 22 bp, Artificial Sequence
  Synthetic: FXN 3 reverse 9:69043341-69043366; SpCas9
ctaacacatgcattttctctgt

SEQ ID NO: 39537 - DNA, 21 bp, Artificial Sequence
  Synthetic: FXN 3 reverse 9:69043342-69043366; SpCas9
taacacatgcattttctctgt

SEQ ID NO: 39538 - DNA, 20 bp, Artificial Sequence
  Synthetic: FXN 3 reverse 9:69043343-69043366; SpCas9
aacacatgcattttctctgt

SEQ ID NO: 39539 - DNA, 19 bp, Artificial Sequence
  Synthetic: FXN 3 reverse 9:69043344-69043366; SpCas9
acacatgcattttctctgt

SEQ ID NO: 39540 - DNA, 18 bp, Artificial Sequence
  Synthetic: FXN 3 reverse 9:69043345-69043366; SpCas9
cacatgcattttctctgt

SEQ ID NO: 39541 - DNA, 25 bp, Artificial Sequence
  Synthetic: FXN 3 forward 9:69043340-69043368; SpCas9
tacagagaaaatgcatgtgttagag

SEQ ID NO: 39542 - DNA, 24 bp, Artificial Sequence
  Synthetic: FXN 3 forward 9:69043341-69043368; SpCas9
acagagaaaatgcatgtgttagag

SEQ ID NO: 39543 - DNA, 23 bp, Artificial Sequence
  Synthetic: FXN 3 forward 9:69043342-69043368; SpCas9
cagagaaaatgcatgtgttagag

SEQ ID NO: 39544 - DNA, 22 bp, Artificial Sequence
  Synthetic: FXN 3 forward 9:69043343-69043368; SpCas9
agagaaaatgcatgtgttagag

SEQ ID NO: 39545 - DNA, 21 bp, Artificial Sequence
  Synthetic: FXN 3 forward 9:69043344-69043368; SpCas9
gagaaaatgcatgtgttagag

SEQ ID NO: 39546 - DNA, 20 bp, Artificial Sequence
  Synthetic: FXN 3 forward 9:69043345-69043368; SpCas9
agaaaatgcatgtgttagag

SEQ ID NO: 39547 - DNA, 19 bp, Artificial Sequence
  Synthetic: FXN 3 forward 9:69043346-69043368; SpCas9
gaaaatgcatgtgttagag

SEQ ID NO: 39548 - DNA, 18 bp, Artificial Sequence
  Synthetic: FXN 3 forward 9:69043347-69043368; SpCas9
aaaatgcatgtgttagag

SEQ ID NO: 39549 - DNA, 25 bp, Artificial Sequence
  Synthetic: FXN 3 forward 9:69043349-69043377; SpCas9
aatgcatgtgttagagaagctttgt

SEQ ID NO: 39550 - DNA, 24 bp, Artificial Sequence
  Synthetic: FXN 3 forward 9:69043350-69043377; SpCas9
atgcatgtgttagagaagctttgt

SEQ ID NO: 39551 - DNA, 23 bp, Artificial Sequence
  Synthetic: FXN 3 forward 9:69043351-69043377; SpCas9
tgcatgtgttagagaagctttgt

SEQ ID NO: 39552 - DNA, 22 bp, Artificial Sequence
  Synthetic: FXN 3 forward 9:69043352-69043377; SpCas9
gcatgtgttagagaagctttgt

SEQ ID NO: 39553 - DNA, 21 bp, Artificial Sequence
  Synthetic: FXN 3 forward 9:69043353-69043377; SpCas9
catgtgttagagaagctttgt

SEQ ID NO: 39554 - DNA, 20 bp, Artificial Sequence
  Synthetic: FXN 3 forward 9:69043354-69043377; SpCas9
atgtgttagagaagctttgt

SEQ ID NO: 39555 - DNA, 19 bp, Artificial Sequence
  Synthetic: FXN 3 forward 9:69043355-69043377; SpCas9
tgtgttagagaagctttgt

SEQ ID NO: 39556 - DNA, 18 bp, Artificial Sequence
  Synthetic: FXN 3 forward 9:69043356-69043377; SpCas9
gtgttagagaagctttgt

SEQ ID NO: 39557 - DNA, 25 bp, Artificial Sequence
  Synthetic: FXN 3 forward 9:69043350-69043378; SpCas9
atgcatgtgttagagaagctttgtc

SEQ ID NO: 39558 - DNA, 24 bp, Artificial Sequence
  Synthetic: FXN 3 forward 9:69043351-69043378; SpCas9
tgcatgtgttagagaagctttgtc

SEQ ID NO: 39559 - DNA, 23 bp, Artificial Sequence
  Synthetic: FXN 3 forward 9:69043352-69043378; SpCas9
gcatgtgttagagaagctttgtc

SEQ ID NO: 39560 - DNA, 22 bp, Artificial Sequence
  Synthetic: FXN 3 forward 9:69043353-69043378; SpCas9
catgtgttagagaagctttgtc

SEQ ID NO: 39561 - DNA, 21 bp, Artificial Sequence
  Synthetic: FXN 3 forward 9:69043354-69043378; SpCas9
atgtgttagagaagctttgtc

SEQ ID NO: 39562 - DNA, 20 bp, Artificial Sequence
  Synthetic: FXN 3 forward 9:69043355-69043378; SpCas9
tgtgttagagaagctttgtc

SEQ ID NO: 39563 - DNA, 19 bp, Artificial Sequence
  Synthetic: FXN 3 forward 9:69043356-69043378; SpCas9
gtgttagagaagctttgtc

SEQ ID NO: 39564 - DNA, 18 bp, Artificial Sequence
  Synthetic: FXN 3 forward 9:69043357-69043378; SpCas9
tgttagagaagctttgtc

SEQ ID NO: 39565 - DNA, 25 bp, Artificial Sequence
  Synthetic: FXN 3 forward 9:69043356-69043384; SpCas9
gtgttagagaagctttgtcaggcat

SEQ ID NO: 39566 - DNA, 24 bp, Artificial Sequence
  Synthetic: FXN 3 forward 9:69043357-69043384; SpCas9
tgttagagaagctttgtcaggcat

SEQ ID NO: 39567 - DNA, 23 bp, Artificial Sequence
  Synthetic: FXN 3 forward 9:69043358-69043384; SpCas9
gttagagaagctttgtcaggcat

SEQ ID NO: 39568 - DNA, 22 bp, Artificial Sequence
  Synthetic: FXN 3 forward 9:69043359-69043384; SpCas9
ttagagaagctttgtcaggcat

SEQ ID NO: 39569 - DNA, 21 bp, Artificial Sequence
  Synthetic: FXN 3 forward 9:69043360-69043384; SpCas9
tagagaagctttgtcaggcat

SEQ ID NO: 39570 - DNA, 20 bp, Artificial Sequence
  Synthetic: FXN 3 forward 9:69043361-69043384; SpCas9
agagaagctttgtcaggcat

SEQ ID NO: 39571 - DNA, 19 bp, Artificial Sequence
  Synthetic: FXN 3 forward 9:69043362-69043384; SpCas9
gagaagctttgtcaggcat

SEQ ID NO: 39572 - DNA, 18 bp, Artificial Sequence
  Synthetic: FXN 3 forward 9:69043363-69043384; SpCas9
agaagctttgtcaggcat

SEQ ID NO: 39573 - DNA, 25 bp, Artificial Sequence
  Synthetic: FXN 3 forward 9:69043361-69043389; SpCas9
agagaagctttgtcaggcatgagtt

SEQ ID NO: 39574 - DNA, 24 bp, Artificial Sequence
  Synthetic: FXN 3 forward 9:69043362-69043389; SpCas9
gagaagctttgtcaggcatgagtt

SEQ ID NO: 39575 - DNA, 23 bp, Artificial Sequence
  Synthetic: FXN 3 forward 9:69043363-69043389; SpCas9
agaagctttgtcaggcatgagtt

SEQ ID NO: 39576 - DNA, 22 bp, Artificial Sequence
  Synthetic: FXN 3 forward 9:69043364-69043389; SpCas9
gaagctttgtcaggcatgagtt

SEQ ID NO: 39577 - DNA, 21 bp, Artificial Sequence
  Synthetic: FXN 3 forward 9:69043365-69043389; SpCas9
aagctttgtcaggcatgagtt

SEQ ID NO: 39578 - DNA, 20 bp, Artificial Sequence
  Synthetic: FXN 3 forward 9:69043366-69043389; SpCas9
agctttgtcaggcatgagtt

SEQ ID NO: 39579 - DNA, 19 bp, Artificial Sequence
  Synthetic: FXN 3 forward 9:69043367-69043389; SpCas9
gctttgtcaggcatgagtt

SEQ ID NO: 39580 - DNA, 18 bp, Artificial Sequence
  Synthetic: FXN 3 forward 9:69043368-69043389; SpCas9
ctttgtcaggcatgagtt

SEQ ID NO: 39581 - DNA, 25 bp, Artificial Sequence
  Synthetic: FXN 3 forward 9:69043362-69043390; SpCas9
gagaagctttgtcaggcatgagtta

SEQ ID NO: 39582 - DNA, 24 bp, Artificial Sequence
  Synthetic: FXN 3 forward 9:69043363-69043390; SpCas9
agaagctttgtcaggcatgagtta

SEQ ID NO: 39583 - DNA, 23 bp, Artificial Sequence
  Synthetic: FXN 3 forward 9:69043364-69043390; SpCas9
gaagctttgtcaggcatgagtta

SEQ ID NO: 39584 - DNA, 22 bp, Artificial Sequence
  Synthetic: FXN 3 forward 9:69043365-69043390; SpCas9
aagctttgtcaggcatgagtta

SEQ ID NO: 39585 - DNA, 21 bp, Artificial Sequence
  Synthetic: FXN 3 forward 9:69043366-69043390; SpCas9
agctttgtcaggcatgagtta

SEQ ID NO: 39586 - DNA, 20 bp, Artificial Sequence
  Synthetic: FXN 3 forward 9:69043367-69043390; SpCas9
gctttgtcaggcatgagtta

SEQ ID NO: 39587 - DNA, 19 bp, Artificial Sequence
  Synthetic: FXN 3 forward 9:69043368-69043390; SpCas9
ctttgtcaggcatgagtta

SEQ ID NO: 39588 - DNA, 18 bp, Artificial Sequence
  Synthetic: FXN 3 forward 9:69043369-69043390; SpCas9
tttgtcaggcatgagtta

SEQ ID NO: 39589 - DNA, 25 bp, Artificial Sequence
  Synthetic: FXN 3 reverse 9:69043368-69043396; SpCas9
acagcaccttaactcatgcctgaca

SEQ ID NO: 39590 - DNA, 24 bp, Artificial Sequence
  Synthetic: FXN 3 reverse 9:69043369-69043396; SpCas9
cagcaccttaactcatgcctgaca

SEQ ID NO: 39591 - DNA, 23 bp, Artificial Sequence
  Synthetic: FXN 3 reverse 9:69043370-69043396; SpCas9
agcaccttaactcatgcctgaca

SEQ ID NO: 39592 - DNA, 22 bp, Artificial Sequence
  Synthetic: FXN 3 reverse 9:69043371-69043396; SpCas9
gcaccttaactcatgcctgaca

SEQ ID NO: 39593 - DNA, 21 bp, Artificial Sequence
  Synthetic: FXN 3 reverse 9:69043372-69043396; SpCas9
caccttaactcatgcctgaca

SEQ ID NO: 39594 - DNA, 20 bp, Artificial Sequence
  Synthetic: FXN 3 reverse 9:69043373-69043396; SpCas9
accttaactcatgcctgaca

SEQ ID NO: 39595 - DNA, 19 bp, Artificial Sequence
  Synthetic: FXN 3 reverse 9:69043374-69043396; SpCas9
ccttaactcatgcctgaca

SEQ ID NO: 39596 - DNA, 18 bp, Artificial Sequence
  Synthetic: FXN 3 reverse 9:69043375-69043396; SpCas9
cttaactcatgcctgaca

SEQ ID NO: 39597 - DNA, 25 bp, Artificial Sequence
  Synthetic: FXN 3 forward 9:69043377-69043405; SpCas9
gcatgagttaaggtgctgttgtcct

SEQ ID NO: 39598 - DNA, 24 bp, Artificial Sequence
  Synthetic: FXN 3 forward 9:69043378-69043405; SpCas9
catgagttaaggtgctgttgtcct

SEQ ID NO: 39599 - DNA, 23 bp, Artificial Sequence
  Synthetic: FXN 3 forward 9:69043379-69043405; SpCas9
atgagttaaggtgctgttgtcct

SEQ ID NO: 39600 - DNA, 22 bp, Artificial Sequence
  Synthetic: FXN 3 forward 9:69043380-69043405; SpCas9
tgagttaaggtgctgttgtcct

SEQ ID NO: 39601 - DNA, 21 bp, Artificial Sequence
  Synthetic: FXN 3 forward 9:69043381-69043405; SpCas9
gagttaaggtgctgttgtcct

SEQ ID NO: 39602 - DNA, 20 bp, Artificial Sequence
  Synthetic: FXN 3 forward 9:69043382-69043405; SpCas9
agttaaggtgctgttgtcct

SEQ ID NO: 39603 - DNA, 19 bp, Artificial Sequence
  Synthetic: FXN 3 forward 9:69043383-69043405; SpCas9
gttaaggtgctgttgtcct

SEQ ID NO: 39604 - DNA, 18 bp, Artificial Sequence
  Synthetic: FXN 3 forward 9:69043384-69043405; SpCas9
ttaaggtgctgttgtcct

SEQ ID NO: 39605 - DNA, 25 bp, Artificial Sequence
  Synthetic: FXN 3 reverse 9:69043392-69043420; SpCas9
aacaaattaattgatctcaggacaa

SEQ ID NO: 39606 - DNA, 24 bp, Artificial Sequence
  Synthetic: FXN 3 reverse 9:69043393-69043420; SpCas9
acaaattaattgatctcaggacaa

SEQ ID NO: 39607 - DNA, 23 bp, Artificial Sequence
  Synthetic: FXN 3 reverse 9:69043394-69043420; SpCas9
caaattaattgatctcaggacaa

SEQ ID NO: 39608 - DNA, 22 bp, Artificial Sequence
  Synthetic: FXN 3 reverse 9:69043395-69043420; SpCas9
aaattaattgatctcaggacaa

SEQ ID NO: 39609 - DNA, 21 bp, Artificial Sequence
  Synthetic: FXN 3 reverse 9:69043396-69043420; SpCas9
aattaattgatctcaggacaa

SEQ ID NO: 39610 - DNA, 20 bp, Artificial Sequence
  Synthetic: FXN 3 reverse 9:69043397-69043420; SpCas9
attaattgatctcaggacaa

SEQ ID NO: 39611 - DNA, 19 bp, Artificial Sequence
  Synthetic: FXN 3 reverse 9:69043398-69043420; SpCas9
ttaattgatctcaggacaa

SEQ ID NO: 39612 - DNA, 18 bp, Artificial Sequence
  Synthetic: FXN 3 reverse 9:69043399-69043420; SpCas9
taattgatctcaggacaa

SEQ ID NO: 39613 - DNA, 25 bp, Artificial Sequence
  Synthetic: FXN 3 reverse 9:69043399-69043427; SpCas9
caacaacaacaaattaattgatctc

SEQ ID NO: 39614 - DNA, 24 bp, Artificial Sequence
  Synthetic: FXN 3 reverse 9:69043400-69043427; SpCas9
aacaacaacaaattaattgatctc

SEQ ID NO: 39615 - DNA, 23 bp, Artificial Sequence
  Synthetic: FXN 3 reverse 9:69043401-69043427; SpCas9
acaacaacaaattaattgatctc

SEQ ID NO: 39616 - DNA, 22 bp, Artificial Sequence
  Synthetic: FXN 3 reverse 9:69043402-69043427; SpCas9
caacaacaaattaattgatctc

SEQ ID NO: 39617 - DNA, 21 bp, Artificial Sequence
  Synthetic: FXN 3 reverse 9:69043403-69043427; SpCas9
aacaacaaattaattgatctc

SEQ ID NO: 39618 - DNA, 20 bp, Artificial Sequence
  Synthetic: FXN 3 reverse 9:69043404-69043427; SpCas9
acaacaaattaattgatctc

SEQ ID NO: 39619 - DNA, 19 bp, Artificial Sequence
  Synthetic: FXN 3 reverse 9:69043405-69043427; SpCas9
caacaaattaattgatctc

SEQ ID NO: 39620 - DNA, 18 bp, Artificial Sequence
  Synthetic: FXN 3 reverse 9:69043406-69043427; SpCas9
aacaaattaattgatctc

SEQ ID NO: 39621 - DNA, 25 bp, Artificial Sequence
  Synthetic: FXN 3 reverse 9:69043400-69043428; SpCas9
acaacaacaacaaattaattgatct

SEQ ID NO: 39622 - DNA, 24 bp, Artificial Sequence
  Synthetic: FXN 3 reverse 9:69043401-69043428; SpCas9
caacaacaacaaattaattgatct

SEQ ID NO: 39623 - DNA, 23 bp, Artificial Sequence
  Synthetic: FXN 3 reverse 9:69043402-69043428; SpCas9
aacaacaacaaattaattgatct

SEQ ID NO: 39624 - DNA, 22 bp, Artificial Sequence
  Synthetic: FXN 3 reverse 9:69043403-69043428; SpCas9
acaacaacaaattaattgatct

SEQ ID NO: 39625 - DNA, 21 bp, Artificial Sequence
  Synthetic: FXN 3 reverse 9:69043404-69043428; SpCas9
caacaacaaattaattgatct

SEQ ID NO: 39626 - DNA, 20 bp, Artificial Sequence
  Synthetic: FXN 3 reverse 9:69043405-69043428; SpCas9
aacaacaaattaattgatct

SEQ ID NO: 39627 - DNA, 19 bp, Artificial Sequence
  Synthetic: FXN 3 reverse 9:69043406-69043428; SpCas9
acaacaaattaattgatct

SEQ ID NO: 39628 - DNA, 18 bp, Artificial Sequence
  Synthetic: FXN 3 reverse 9:69043407-69043428; SpCas9
caacaaattaattgatct

SEQ ID NO: 39629 - DNA, 25 bp, Artificial Sequence
  Synthetic: FXN 3 forward 9:69043408-69043436; SpCas9
aattaatttgttgttgttgttgttt

SEQ ID NO: 39630 - DNA, 24 bp, Artificial Sequence
  Synthetic: FXN 3 forward 9:69043409-69043436; SpCas9
attaatttgttgttgttgttgttt

SEQ ID NO: 39631 - DNA, 23 bp, Artificial Sequence
  Synthetic: FXN 3 forward 9:69043410-69043436; SpCas9
ttaatttgttgttgttgttgttt

SEQ ID NO: 39632 - DNA, 22 bp, Artificial Sequence
  Synthetic: FXN 3 forward 9:69043411-69043436; SpCas9
taatttgttgttgttgttgttt

SEQ ID NO: 39633 - DNA, 21 bp, Artificial Sequence
  Synthetic: FXN 3 forward 9:69043412-69043436; SpCas9
aatttgttgttgttgttgttt

SEQ ID NO: 39634 - DNA, 20 bp, Artificial Sequence
  Synthetic: FXN 3 forward 9:69043413-69043436; SpCas9
atttgttgttgttgttgttt

SEQ ID NO: 39635 - DNA, 19 bp, Artificial Sequence
  Synthetic: FXN 3 forward 9:69043414-69043436; SpCas9
tttgttgttgttgttgttt

SEQ ID NO: 39636 - DNA, 18 bp, Artificial Sequence
  Synthetic: FXN 3 forward 9:69043415-69043436; SpCas9
ttgttgttgttgttgttt

SEQ ID NO: 39637 - DNA, 25 bp, Artificial Sequence
  Synthetic: FXN 3 forward 9:69043412-69043440; SpCas9
aatttgttgttgttgttgtttgaga

SEQ ID NO: 39638 - DNA, 24 bp, Artificial Sequence
  Synthetic: FXN 3 forward 9:69043413-69043440; SpCas9
atttgttgttgttgttgtttgaga

SEQ ID NO: 39639 - DNA, 23 bp, Artificial Sequence
  Synthetic: FXN 3 forward 9:69043414-69043440; SpCas9
tttgttgttgttgttgtttgaga

SEQ ID NO: 39640 - DNA, 22 bp, Artificial Sequence
  Synthetic: FXN 3 forward 9:69043415-69043440; SpCas9
ttgttgttgttgttgtttgaga

SEQ ID NO: 39641 - DNA, 21 bp, Artificial Sequence
  Synthetic: FXN 3 forward 9:69043416-69043440; SpCas9
tgttgttgttgttgtttgaga

SEQ ID NO: 39642 - DNA, 20 bp, Artificial Sequence
  Synthetic: FXN 3 forward 9:69043417-69043440; SpCas9
gttgttgttgttgtttgaga

SEQ ID NO: 39643 - DNA, 19 bp, Artificial Sequence
  Synthetic: FXN 3 forward 9:69043418-69043440; SpCas9
ttgttgttgttgtttgaga

SEQ ID NO: 39644 - DNA, 18 bp, Artificial Sequence
  Synthetic: FXN 3 forward 9:69043419-69043440; SpCas9
tgttgttgttgtttgaga

SEQ ID NO: 39645 - DNA, 25 bp, Artificial Sequence
  Synthetic: FXN 3 forward 9:69043413-69043441; SpCas9
atttgttgttgttgttgtttgagac

SEQ ID NO: 39646 - DNA, 24 bp, Artificial Sequence
  Synthetic: FXN 3 forward 9:69043414-69043441; SpCas9
tttgttgttgttgttgtttgagac

SEQ ID NO: 39647 - DNA, 23 bp, Artificial Sequence
  Synthetic: FXN 3 forward 9:69043415-69043441; SpCas9
ttgttgttgttgttgtttgagac

SEQ ID NO: 39648 - DNA, 22 bp, Artificial Sequence
  Synthetic: FXN 3 forward 9:69043416-69043441; SpCas9
tgttgttgttgttgtttgagac

SEQ ID NO: 39649 - DNA, 21 bp, Artificial Sequence
  Synthetic: FXN 3 forward 9:69043417-69043441; SpCas9
gttgttgttgttgtttgagac

SEQ ID NO: 39650 - DNA, 20 bp, Artificial Sequence
  Synthetic: FXN 3 forward 9:69043418-69043441; SpCas9
ttgttgttgttgtttgagac

SEQ ID NO: 39651 - DNA, 19 bp, Artificial Sequence
  Synthetic: FXN 3 forward 9:69043419-69043441; SpCas9
tgttgttgttgtttgagac

SEQ ID NO: 39652 - DNA, 18 bp, Artificial Sequence
  Synthetic: FXN 3 forward 9:69043420-69043441; SpCas9
gttgttgttgtttgagac

SEQ ID NO: 39653 - DNA, 25 bp, Artificial Sequence
  Synthetic: FXN 3 forward 9:69043414-69043442; SpCas9
tttgttgttgttgttgtttgagaca

SEQ ID NO: 39654 - DNA, 24 bp, Artificial Sequence
  Synthetic: FXN 3 forward 9:69043415-69043442; SpCas9
ttgttgttgttgttgtttgagaca

SEQ ID NO: 39655 - DNA, 23 bp, Artificial Sequence
  Synthetic: FXN 3 forward 9:69043416-69043442; SpCas9
tgttgttgttgttgtttgagaca

SEQ ID NO: 39656 - DNA, 22 bp, Artificial Sequence
  Synthetic: FXN 3 forward 9:69043417-69043442; SpCas9
gttgttgttgttgtttgagaca

SEQ ID NO: 39657 - DNA, 21 bp, Artificial Sequence
  Synthetic: FXN 3 forward 9:69043418-69043442; SpCas9
ttgttgttgttgtttgagaca

SEQ ID NO: 39658 - DNA, 20 bp, Artificial Sequence
  Synthetic: FXN 3 forward 9:69043419-69043442; SpCas9
tgttgttgttgtttgagaca

SEQ ID NO: 39659 - DNA, 19 bp, Artificial Sequence
  Synthetic: FXN 3 forward 9:69043420-69043442; SpCas9
gttgttgttgtttgagaca

SEQ ID NO: 39660 - DNA, 18 bp, Artificial Sequence
  Synthetic: FXN 3 forward 9:69043421-69043442; SpCas9
ttgttgttgtttgagaca

SEQ ID NO: 39661 - DNA, 25 bp, Artificial Sequence
  Synthetic: FXN 3 forward 9:69043432-69043460; SpCas9
tgagacagggtctccctctgttgcc

SEQ ID NO: 39662 - DNA, 24 bp, Artificial Sequence
  Synthetic: FXN 3 forward 9:69043433-69043460; SpCas9
gagacagggtctccctctgttgcc

SEQ ID NO: 39663 - DNA, 23 bp, Artificial Sequence
  Synthetic: FXN 3 forward 9:69043434-69043460; SpCas9
agacagggtctccctctgttgcc

SEQ ID NO: 39664 - DNA, 22 bp, Artificial Sequence
  Synthetic: FXN 3 forward 9:69043435-69043460; SpCas9
gacagggtctccctctgttgcc

SEQ ID NO: 39665 - DNA, 21 bp, Artificial Sequence
  Synthetic: FXN 3 forward 9:69043436-69043460; SpCas9
acagggtctccctctgttgcc

SEQ ID NO: 39666 - DNA, 20 bp, Artificial Sequence
  Synthetic: FXN 3 forward 9:69043437-69043460; SpCas9
cagggtctccctctgttgcc

SEQ ID NO: 39667 - DNA, 19 bp, Artificial Sequence
  Synthetic: FXN 3 forward 9:69043438-69043460; SpCas9
agggtctccctctgttgcc

SEQ ID NO: 39668 - DNA, 18 bp, Artificial Sequence
  Synthetic: FXN 3 forward 9:69043439-69043460; SpCas9
gggtctccctctgttgcc

SEQ ID NO: 39669 - DNA, 25 bp, Artificial Sequence
  Synthetic: FXN 3 forward 9:69043433-69043461; SpCas9
gagacagggtctccctctgttgccc

SEQ ID NO: 39670 - DNA, 24 bp, Artificial Sequence
  Synthetic: FXN 3 forward 9:69043434-69043461; SpCas9
agacagggtctccctctgttgccc

SEQ ID NO: 39671 - DNA, 23 bp, Artificial Sequence
  Synthetic: FXN 3 forward 9:69043435-69043461; SpCas9
gacagggtctccctctgttgccc

SEQ ID NO: 39672 - DNA, 22 bp, Artificial Sequence
  Synthetic: FXN 3 forward 9:69043436-69043461; SpCas9
acagggtctccctctgttgccc

SEQ ID NO: 39673 - DNA, 21 bp, Artificial Sequence
  Synthetic: FXN 3 forward 9:69043437-69043461; SpCas9
cagggtctccctctgttgccc

SEQ ID NO: 39674 - DNA, 20 bp, Artificial Sequence
  Synthetic: FXN 3 forward 9:69043438-69043461; SpCas9
agggtctccctctgttgccc

SEQ ID NO: 39675 - DNA, 19 bp, Artificial Sequence
  Synthetic: FXN 3 forward 9:69043439-69043461; SpCas9
gggtctccctctgttgccc

SEQ ID NO: 39676 - DNA, 18 bp, Artificial Sequence
  Synthetic: FXN 3 forward 9:69043440-69043461; SpCas9
ggtctccctctgttgccc

SEQ ID NO: 39677 - DNA, 25 bp, Artificial Sequence
  Synthetic: FXN 3 forward 9:69043440-69043468; SpCas9
ggtctccctctgttgcccaggctgc

SEQ ID NO: 39678 - DNA, 24 bp, Artificial Sequence
  Synthetic: FXN 3 forward 9:69043441-69043468; SpCas9
gtctccctctgttgcccaggctgc

SEQ ID NO: 39679 - DNA, 23 bp, Artificial Sequence
  Synthetic: FXN 3 forward 9:69043442-69043468; SpCas9
tctccctctgttgcccaggctgc

SEQ ID NO: 39680 - DNA, 22 bp, Artificial Sequence
  Synthetic: FXN 3 forward 9:69043443-69043468; SpCas9
ctccctctgttgcccaggctgc

SEQ ID NO: 39681 - DNA, 21 bp, Artificial Sequence
  Synthetic: FXN 3 forward 9:69043444-69043468; SpCas9
tccctctgttgcccaggctgc

SEQ ID NO: 39682 - DNA, 20 bp, Artificial Sequence
  Synthetic: FXN 3 forward 9:69043445-69043468; SpCas9
ccctctgttgcccaggctgc

SEQ ID NO: 39683 - DNA, 19 bp, Artificial Sequence
  Synthetic: FXN 3 forward 9:69043446-69043468; SpCas9
cctctgttgcccaggctgc

SEQ ID NO: 39684 - DNA, 18 bp, Artificial Sequence
  Synthetic: FXN 3 forward 9:69043447-69043468; SpCas9
ctctgttgcccaggctgc

SEQ ID NO: 39685 - DNA, 25 bp, Artificial Sequence
  Synthetic: FXN 3 forward 9:69043442-69043470; SpCas9
tctccctctgttgcccaggctgctg

SEQ ID NO: 39686 - DNA, 24 bp, Artificial Sequence
  Synthetic: FXN 3 forward 9:69043443-69043470; SpCas9
ctccctctgttgcccaggctgctg

SEQ ID NO: 39687 - DNA, 23 bp, Artificial Sequence
  Synthetic: FXN 3 forward 9:69043444-69043470; SpCas9
tccctctgttgcccaggctgctg

SEQ ID NO: 39688 - DNA, 22 bp, Artificial Sequence
  Synthetic: FXN 3 forward 9:69043445-69043470; SpCas9
ccctctgttgcccaggctgctg

SEQ ID NO: 39689 - DNA, 21 bp, Artificial Sequence
  Synthetic: FXN 3 forward 9:69043446-69043470; SpCas9
cctctgttgcccaggctgctg

SEQ ID NO: 39690 - DNA, 20 bp, Artificial Sequence
  Synthetic: FXN 3 forward 9:69043447-69043470; SpCas9
ctctgttgcccaggctgctg

SEQ ID NO: 39691 - DNA, 19 bp, Artificial Sequence
  Synthetic: FXN 3 forward 9:69043448-69043470; SpCas9
tctgttgcccaggctgctg

SEQ ID NO: 39692 - DNA, 18 bp, Artificial Sequence
  Synthetic: FXN 3 forward 9:69043449-69043470; SpCas9
ctgttgcccaggctgctg

SEQ ID NO: 39693 - DNA, 25 bp, Artificial Sequence
  Synthetic: FXN 3 reverse 9:69043443-69043471; SpCas9
actccagcagcctgggcaacagagg

SEQ ID NO: 39694 - DNA, 24 bp, Artificial Sequence
  Synthetic: FXN 3 reverse 9:69043444-69043471; SpCas9
ctccagcagcctgggcaacagagg

SEQ ID NO: 39695 - DNA, 23 bp, Artificial Sequence
  Synthetic: FXN 3 reverse 9:69043445-69043471; SpCas9
tccagcagcctgggcaacagagg

SEQ ID NO: 39696 - DNA, 22 bp, Artificial Sequence
  Synthetic: FXN 3 reverse 9:69043446-69043471; SpCas9
ccagcagcctgggcaacagagg

SEQ ID NO: 39697 - DNA, 21 bp, Artificial Sequence
  Synthetic: FXN 3 reverse 9:69043447-69043471; SpCas9
cagcagcctgggcaacagagg

SEQ ID NO: 39698 - DNA, 20 bp, Artificial Sequence
  Synthetic: FXN 3 reverse 9:69043448-69043471; SpCas9
agcagcctgggcaacagagg

SEQ ID NO: 39699 - DNA, 19 bp, Artificial Sequence
  Synthetic: FXN 3 reverse 9:69043449-69043471; SpCas9
gcagcctgggcaacagagg

SEQ ID NO: 39700 - DNA, 18 bp, Artificial Sequence
  Synthetic: FXN 3 reverse 9:69043450-69043471; SpCas9
cagcctgggcaacagagg

SEQ ID NO: 39701 - DNA, 25 bp, Artificial Sequence
  Synthetic: FXN 3 reverse 9:69043445-69043473; SpCas9
gcactccagcagcctgggcaacaga

SEQ ID NO: 39702 - DNA, 24 bp, Artificial Sequence
  Synthetic: FXN 3 reverse 9:69043446-69043473; SpCas9
cactccagcagcctgggcaacaga

SEQ ID NO: 39703 - DNA, 23 bp, Artificial Sequence
  Synthetic: FXN 3 reverse 9:69043447-69043473; SpCas9
actccagcagcctgggcaacaga

SEQ ID NO: 39704 - DNA, 22 bp, Artificial Sequence
  Synthetic: FXN 3 reverse 9:69043448-69043473; SpCas9
ctccagcagcctgggcaacaga

SEQ ID NO: 39705 - DNA, 21 bp, Artificial Sequence
  Synthetic: FXN 3 reverse 9:69043449-69043473; SpCas9
tccagcagcctgggcaacaga

SEQ ID NO: 39706 - DNA, 20 bp, Artificial Sequence
  Synthetic: FXN 3 reverse 9:69043450-69043473; SpCas9
ccagcagcctgggcaacaga

SEQ ID NO: 39707 - DNA, 19 bp, Artificial Sequence
  Synthetic: FXN 3 reverse 9:69043451-69043473; SpCas9
cagcagcctgggcaacaga

SEQ ID NO: 39708 - DNA, 18 bp, Artificial Sequence
  Synthetic: FXN 3 reverse 9:69043452-69043473; SpCas9
agcagcctgggcaacaga

SEQ ID NO: 39709 - DNA, 25 bp, Artificial Sequence
  Synthetic: FXN 3 reverse 9:69043446-69043474; SpCas9
tgcactccagcagcctgggcaacag

SEQ ID NO: 39710 - DNA, 24 bp, Artificial Sequence
  Synthetic: FXN 3 reverse 9:69043447-69043474; SpCas9
gcactccagcagcctgggcaacag

SEQ ID NO: 39711 - DNA, 23 bp, Artificial Sequence
  Synthetic: FXN 3 reverse 9:69043448-69043474; SpCas9
cactccagcagcctgggcaacag

SEQ ID NO: 39712 - DNA, 22 bp, Artificial Sequence
  Synthetic: FXN 3 reverse 9:69043449-69043474; SpCas9
actccagcagcctgggcaacag

SEQ ID NO: 39713 - DNA, 21 bp, Artificial Sequence
  Synthetic: FXN 3 reverse 9:69043450-69043474; SpCas9
ctccagcagcctgggcaacag

SEQ ID NO: 39714 - DNA, 20 bp, Artificial Sequence
  Synthetic: FXN 3 reverse 9:69043451-69043474; SpCas9
tccagcagcctgggcaacag

SEQ ID NO: 39715 - DNA, 19 bp, Artificial Sequence
  Synthetic: FXN 3 reverse 9:69043452-69043474; SpCas9
ccagcagcctgggcaacag

SEQ ID NO: 39716 - DNA, 18 bp, Artificial Sequence
  Synthetic: FXN 3 reverse 9:69043453-69043474; SpCas9
cagcagcctgggcaacag

SEQ ID NO: 39717 - DNA, 25 bp, Artificial Sequence
  Synthetic: FXN 3 reverse 9:69043447-69043475; SpCas9
ttgcactccagcagcctgggcaaca

SEQ ID NO: 39718 - DNA, 24 bp, Artificial Sequence
  Synthetic: FXN 3 reverse 9:69043448-69043475; SpCas9
tgcactccagcagcctgggcaaca

SEQ ID NO: 39719 - DNA, 23 bp, Artificial Sequence
  Synthetic: FXN 3 reverse 9:69043449-69043475; SpCas9
gcactccagcagcctgggcaaca

SEQ ID NO: 39720 - DNA, 22 bp, Artificial Sequence
  Synthetic: FXN 3 reverse 9:69043450-69043475; SpCas9
cactccagcagcctgggcaaca

SEQ ID NO: 39721 - DNA, 21 bp, Artificial Sequence
  Synthetic: FXN 3 reverse 9:69043451-69043475; SpCas9
actccagcagcctgggcaaca

SEQ ID NO: 39722 - DNA, 20 bp, Artificial Sequence
  Synthetic: FXN 3 reverse 9:69043452-69043475; SpCas9
ctccagcagcctgggcaaca

SEQ ID NO: 39723 - DNA, 19 bp, Artificial Sequence
  Synthetic: FXN 3 reverse 9:69043453-69043475; SpCas9
tccagcagcctgggcaaca

SEQ ID NO: 39724 - DNA, 18 bp, Artificial Sequence
  Synthetic: FXN 3 reverse 9:69043454-69043475; SpCas9
ccagcagcctgggcaaca

SEQ ID NO: 39725 - DNA, 25 bp, Artificial Sequence
  Synthetic: FXN 3 reverse 9:69043449-69043477; SpCas9
cattgcactccagcagcctgggcaa

SEQ ID NO: 39726 - DNA, 24 bp, Artificial Sequence
  Synthetic: FXN 3 reverse 9:69043450-69043477; SpCas9
attgcactccagcagcctgggcaa

SEQ ID NO: 39727 - DNA, 23 bp, Artificial Sequence
  Synthetic: FXN 3 reverse 9:69043451-69043477; SpCas9
ttgcactccagcagcctgggcaa

SEQ ID NO: 39728 - DNA, 22 bp, Artificial Sequence
  Synthetic: FXN 3 reverse 9:69043452-69043477; SpCas9
tgcactccagcagcctgggcaa

SEQ ID NO: 39729 - DNA, 21 bp, Artificial Sequence
  Synthetic: FXN 3 reverse 9:69043453-69043477; SpCas9
gcactccagcagcctgggcaa

SEQ ID NO: 39730 - DNA, 20 bp, Artificial Sequence
  Synthetic: FXN 3 reverse 9:69043454-69043477; SpCas9
cactccagcagcctgggcaa

SEQ ID NO: 39731 - DNA, 19 bp, Artificial Sequence
  Synthetic: FXN 3 reverse 9:69043455-69043477; SpCas9
actccagcagcctgggcaa

SEQ ID NO: 39732 - DNA, 18 bp, Artificial Sequence
  Synthetic: FXN 3 reverse 9:69043456-69043477; SpCas9
ctccagcagcctgggcaa

SEQ ID NO: 39733 - DNA, 25 bp, Artificial Sequence
  Synthetic: FXN 3 forward 9:69043450-69043478; SpCas9
tgttgcccaggctgctggagtgcaa

SEQ ID NO: 39734 - DNA, 24 bp, Artificial Sequence
  Synthetic: FXN 3 forward 9:69043451-69043478; SpCas9
gttgcccaggctgctggagtgcaa

SEQ ID NO: 39735 - DNA, 23 bp, Artificial Sequence
  Synthetic: FXN 3 forward 9:69043452-69043478; SpCas9
ttgcccaggctgctggagtgcaa

SEQ ID NO: 39736 - DNA, 22 bp, Artificial Sequence
  Synthetic: FXN 3 forward 9:69043453-69043478; SpCas9
tgcccaggctgctggagtgcaa

SEQ ID NO: 39737 - DNA, 21 bp, Artificial Sequence
  Synthetic: FXN 3 forward 9:69043454-69043478; SpCas9
gcccaggctgctggagtgcaa

SEQ ID NO: 39738 - DNA, 20 bp, Artificial Sequence
  Synthetic: FXN 3 forward 9:69043455-69043478; SpCas9
cccaggctgctggagtgcaa

SEQ ID NO: 39739 - DNA, 19 bp, Artificial Sequence
  Synthetic: FXN 3 forward 9:69043456-69043478; SpCas9
ccaggctgctggagtgcaa

SEQ ID NO: 39740 - DNA, 18 bp, Artificial Sequence
  Synthetic: FXN 3 forward 9:69043457-69043478; SpCas9
caggctgctggagtgcaa

SEQ ID NO: 39741 - DNA, 25 bp, Artificial Sequence
  Synthetic: FXN 3 reverse 9:69043455-69043483; SpCas9
ttacaccattgcactccagcagcct

SEQ ID NO: 39742 - DNA, 24 bp, Artificial Sequence
  Synthetic: FXN 3 reverse 9:69043456-69043483; SpCas9
tacaccattgcactccagcagcct

SEQ ID NO: 39743 - DNA, 23 bp, Artificial Sequence
  Synthetic: FXN 3 reverse 9:69043457-69043483; SpCas9
acaccattgcactccagcagcct

SEQ ID NO: 39744 - DNA, 22 bp, Artificial Sequence
  Synthetic: FXN 3 reverse 9:69043458-69043483; SpCas9
caccattgcactccagcagcct

SEQ ID NO: 39745 - DNA, 21 bp, Artificial Sequence
  Synthetic: FXN 3 reverse 9:69043459-69043483; SpCas9
accattgcactccagcagcct

SEQ ID NO: 39746 - DNA, 20 bp, Artificial Sequence
  Synthetic: FXN 3 reverse 9:69043460-69043483; SpCas9
ccattgcactccagcagcct

SEQ ID NO: 39747 - DNA, 19 bp, Artificial Sequence
  Synthetic: FXN 3 reverse 9:69043461-69043483; SpCas9
cattgcactccagcagcct

SEQ ID NO: 39748 - DNA, 18 bp, Artificial Sequence
  Synthetic: FXN 3 reverse 9:69043462-69043483; SpCas9
attgcactccagcagcct

SEQ ID NO: 39749 - DNA, 25 bp, Artificial Sequence
  Synthetic: FXN 3 reverse 9:69043456-69043484; SpCas9
attacaccattgcactccagcagcc

SEQ ID NO: 39750 - DNA, 24 bp, Artificial Sequence
  Synthetic: FXN 3 reverse 9:69043457-69043484; SpCas9
ttacaccattgcactccagcagcc

SEQ ID NO: 39751 - DNA, 23 bp, Artificial Sequence
  Synthetic: FXN 3 reverse 9:69043458-69043484; SpCas9
tacaccattgcactccagcagcc

SEQ ID NO: 39752 - DNA, 22 bp, Artificial Sequence
  Synthetic: FXN 3 reverse 9:69043459-69043484; SpCas9
acaccattgcactccagcagcc

SEQ ID NO: 39753 - DNA, 21 bp, Artificial Sequence
  Synthetic: FXN 3 reverse 9:69043460-69043484; SpCas9
caccattgcactccagcagcc

SEQ ID NO: 39754 - DNA, 20 bp, Artificial Sequence
  Synthetic: FXN 3 reverse 9:69043461-69043484; SpCas9
accattgcactccagcagcc

SEQ ID NO: 39755 - DNA, 19 bp, Artificial Sequence
  Synthetic: FXN 3 reverse 9:69043462-69043484; SpCas9
ccattgcactccagcagcc

SEQ ID NO: 39756 - DNA, 18 bp, Artificial Sequence
  Synthetic: FXN 3 reverse 9:69043463-69043484; SpCas9
cattgcactccagcagcc

SEQ ID NO: 39757 - DNA, 25 bp, Artificial Sequence
  Synthetic: FXN 3 forward 9:69043461-69043489; SpCas9
ctgctggagtgcaatggtgtaatca

SEQ ID NO: 39758 - DNA, 24 bp, Artificial Sequence
  Synthetic: FXN 3 forward 9:69043462-69043489; SpCas9
tgctggagtgcaatggtgtaatca

SEQ ID NO: 39759 - DNA, 23 bp, Artificial Sequence
  Synthetic: FXN 3 forward 9:69043463-69043489; SpCas9
gctggagtgcaatggtgtaatca

SEQ ID NO: 39760 - DNA, 22 bp, Artificial Sequence
  Synthetic: FXN 3 forward 9:69043464-69043489; SpCas9
ctggagtgcaatggtgtaatca

SEQ ID NO: 39761 - DNA, 21 bp, Artificial Sequence
  Synthetic: FXN 3 forward 9:69043465-69043489; SpCas9
tggagtgcaatggtgtaatca

SEQ ID NO: 39762 - DNA, 20 bp, Artificial Sequence
  Synthetic: FXN 3 forward 9:69043466-69043489; SpCas9
ggagtgcaatggtgtaatca

SEQ ID NO: 39763 - DNA, 19 bp, Artificial Sequence
  Synthetic: FXN 3 forward 9:69043467-69043489; SpCas9
gagtgcaatggtgtaatca

SEQ ID NO: 39764 - DNA, 18 bp, Artificial Sequence
  Synthetic: FXN 3 forward 9:69043468-69043489; SpCas9
agtgcaatggtgtaatca

SEQ ID NO: 39765 - DNA, 25 bp, Artificial Sequence
  Synthetic: FXN 3 reverse 9:69043461-69043489; SpCas9
ctatgattacaccattgcactccag

SEQ ID NO: 39766 - DNA, 24 bp, Artificial Sequence
  Synthetic: FXN 3 reverse 9:69043462-69043489; SpCas9
tatgattacaccattgcactccag

SEQ ID NO: 39767 - DNA, 23 bp, Artificial Sequence
  Synthetic: FXN 3 reverse 9:69043463-69043489; SpCas9
atgattacaccattgcactccag

SEQ ID NO: 39768 - DNA, 22 bp, Artificial Sequence
  Synthetic: FXN 3 reverse 9:69043464-69043489; SpCas9
tgattacaccattgcactccag

SEQ ID NO: 39769 - DNA, 21 bp, Artificial Sequence
  Synthetic: FXN 3 reverse 9:69043465-69043489; SpCas9
gattacaccattgcactccag

SEQ ID NO: 39770 - DNA, 20 bp, Artificial Sequence
  Synthetic: FXN 3 reverse 9:69043466-69043489; SpCas9
attacaccattgcactccag

SEQ ID NO: 39771 - DNA, 19 bp, Artificial Sequence
  Synthetic: FXN 3 reverse 9:69043467-69043489; SpCas9
ttacaccattgcactccag

SEQ ID NO: 39772 - DNA, 18 bp, Artificial Sequence
  Synthetic: FXN 3 reverse 9:69043468-69043489; SpCas9
tacaccattgcactccag

SEQ ID NO: 39773 - DNA, 25 bp, Artificial Sequence
  Synthetic: FXN 3 reverse 9:69043464-69043492; SpCas9
gagctatgattacaccattgcactc

SEQ ID NO: 39774 - DNA, 24 bp, Artificial Sequence
  Synthetic: FXN 3 reverse 9:69043465-69043492; SpCas9
agctatgattacaccattgcactc

SEQ ID NO: 39775 - DNA, 23 bp, Artificial Sequence
  Synthetic: FXN 3 reverse 9:69043466-69043492; SpCas9
gctatgattacaccattgcactc

SEQ ID NO: 39776 - DNA, 22 bp, Artificial Sequence
  Synthetic: FXN 3 reverse 9:69043467-69043492; SpCas9
ctatgattacaccattgcactc

SEQ ID NO: 39777 - DNA, 21 bp, Artificial Sequence
  Synthetic: FXN 3 reverse 9:69043468-69043492; SpCas9
tatgattacaccattgcactc

SEQ ID NO: 39778 - DNA, 20 bp, Artificial Sequence
  Synthetic: FXN 3 reverse 9:69043469-69043492; SpCas9
atgattacaccattgcactc

SEQ ID NO: 39779 - DNA, 19 bp, Artificial Sequence
  Synthetic: FXN 3 reverse 9:69043470-69043492; SpCas9
tgattacaccattgcactc

SEQ ID NO: 39780 - DNA, 18 bp, Artificial Sequence
  Synthetic: FXN 3 reverse 9:69043471-69043492; SpCas9
gattacaccattgcactc

SEQ ID NO: 39781 - DNA, 25 bp, Artificial Sequence
  Synthetic: FXN 3 forward 9:69043471-69043499; SpCas9
gcaatggtgtaatcatagctcactg

SEQ ID NO: 39782 - DNA, 24 bp, Artificial Sequence
  Synthetic: FXN 3 forward 9:69043472-69043499; SpCas9
caatggtgtaatcatagctcactg

SEQ ID NO: 39783 - DNA, 23 bp, Artificial Sequence
  Synthetic: FXN 3 forward 9:69043473-69043499; SpCas9
aatggtgtaatcatagctcactg

SEQ ID NO: 39784 - DNA, 22 bp, Artificial Sequence
  Synthetic: FXN 3 forward 9:69043474-69043499; SpCas9
atggtgtaatcatagctcactg

SEQ ID NO: 39785 - DNA, 21 bp, Artificial Sequence
  Synthetic: FXN 3 forward 9:69043475-69043499; SpCas9
tggtgtaatcatagctcactg

SEQ ID NO: 39786 - DNA, 20 bp, Artificial Sequence
  Synthetic: FXN 3 forward 9:69043476-69043499; SpCas9
ggtgtaatcatagctcactg

SEQ ID NO: 39787 - DNA, 19 bp, Artificial Sequence
  Synthetic: FXN 3 forward 9:69043477-69043499; SpCas9
gtgtaatcatagctcactg

SEQ ID NO: 39788 - DNA, 18 bp, Artificial Sequence
  Synthetic: FXN 3 forward 9:69043478-69043499; SpCas9
tgtaatcatagctcactg

SEQ ID NO: 39789 - DNA, 25 bp, Artificial Sequence
  Synthetic: FXN 3 forward 9:69043486-69043514; SpCas9
tagctcactgcagcctctacctctc

SEQ ID NO: 39790 - DNA, 24 bp, Artificial Sequence
  Synthetic: FXN 3 forward 9:69043487-69043514; SpCas9
agctcactgcagcctctacctctc

SEQ ID NO: 39791 - DNA, 23 bp, Artificial Sequence
  Synthetic: FXN 3 forward 9:69043488-69043514; SpCas9
gctcactgcagcctctacctctc

SEQ ID NO: 39792 - DNA, 22 bp, Artificial Sequence
  Synthetic: FXN 3 forward 9:69043489-69043514; SpCas9
ctcactgcagcctctacctctc

SEQ ID NO: 39793 - DNA, 21 bp, Artificial Sequence
  Synthetic: FXN 3 forward 9:69043490-69043514; SpCas9
tcactgcagcctctacctctc

SEQ ID NO: 39794 - DNA, 20 bp, Artificial Sequence
  Synthetic: FXN 3 forward 9:69043491-69043514; SpCas9
cactgcagcctctacctctc

SEQ ID NO: 39795 - DNA, 19 bp, Artificial Sequence
  Synthetic: FXN 3 forward 9:69043492-69043514; SpCas9
actgcagcctctacctctc

SEQ ID NO: 39796 - DNA, 18 bp, Artificial Sequence
  Synthetic: FXN 3 forward 9:69043493-69043514; SpCas9
ctgcagcctctacctctc

SEQ ID NO: 39797 - DNA, 25 bp, Artificial Sequence
  Synthetic: FXN 3 reverse 9:69043489-69043517; SpCas9
gagccagagaggtagaggctgcagt

SEQ ID NO: 39798 - DNA, 24 bp, Artificial Sequence
  Synthetic: FXN 3 reverse 9:69043490-69043517; SpCas9
agccagagaggtagaggctgcagt

SEQ ID NO: 39799 - DNA, 23 bp, Artificial Sequence
  Synthetic: FXN 3 reverse 9:69043491-69043517; SpCas9
gccagagaggtagaggctgcagt

SEQ ID NO: 39800 - DNA, 22 bp, Artificial Sequence
  Synthetic: FXN 3 reverse 9:69043492-69043517; SpCas9
ccagagaggtagaggctgcagt

SEQ ID NO: 39801 - DNA, 21 bp, Artificial Sequence
  Synthetic: FXN 3 reverse 9:69043493-69043517; SpCas9
cagagaggtagaggctgcagt

SEQ ID NO: 39802 - DNA, 20 bp, Artificial Sequence
  Synthetic: FXN 3 reverse 9:69043494-69043517; SpCas9
agagaggtagaggctgcagt

SEQ ID NO: 39803 - DNA, 19 bp, Artificial Sequence
  Synthetic: FXN 3 reverse 9:69043495-69043517; SpCas9
gagaggtagaggctgcagt

SEQ ID NO: 39804 - DNA, 18 bp, Artificial Sequence
  Synthetic: FXN 3 reverse 9:69043496-69043517; SpCas9
agaggtagaggctgcagt

SEQ ID NO: 39805 - DNA, 25 bp, Artificial Sequence
  Synthetic: FXN 3 forward 9:69043492-69043520; SpCas9
actgcagcctctacctctctggctc

SEQ ID NO: 39806 - DNA, 24 bp, Artificial Sequence
  Synthetic: FXN 3 forward 9:69043493-69043520; SpCas9
ctgcagcctctacctctctggctc

SEQ ID NO: 39807 - DNA, 23 bp, Artificial Sequence
  Synthetic: FXN 3 forward 9:69043494-69043520; SpCas9
tgcagcctctacctctctggctc

SEQ ID NO: 39808 - DNA, 22 bp, Artificial Sequence
  Synthetic: FXN 3 forward 9:69043495-69043520; SpCas9
gcagcctctacctctctggctc

SEQ ID NO: 39809 - DNA, 21 bp, Artificial Sequence
  Synthetic: FXN 3 forward 9:69043496-69043520; SpCas9
cagcctctacctctctggctc

SEQ ID NO: 39810 - DNA, 20 bp, Artificial Sequence
  Synthetic: FXN 3 forward 9:69043497-69043520; SpCas9
agcctctacctctctggctc

SEQ ID NO: 39811 - DNA, 19 bp, Artificial Sequence
  Synthetic: FXN 3 forward 9:69043498-69043520; SpCas9
gcctctacctctctggctc

SEQ ID NO: 39812 - DNA, 18 bp, Artificial Sequence
  Synthetic: FXN 3 forward 9:69043499-69043520; SpCas9
cctctacctctctggctc

SEQ ID NO: 39813 - DNA, 25 bp, Artificial Sequence
  Synthetic: FXN 3 reverse 9:69043493-69043521; SpCas9
gcttgagccagagaggtagaggctg

SEQ ID NO: 39814 - DNA, 24 bp, Artificial Sequence
  Synthetic: FXN 3 reverse 9:69043494-69043521; SpCas9
cttgagccagagaggtagaggctg

SEQ ID NO: 39815 - DNA, 23 bp, Artificial Sequence
  Synthetic: FXN 3 reverse 9:69043495-69043521; SpCas9
ttgagccagagaggtagaggctg

SEQ ID NO: 39816 - DNA, 22 bp, Artificial Sequence
  Synthetic: FXN 3 reverse 9:69043496-69043521; SpCas9
tgagccagagaggtagaggctg

SEQ ID NO: 39817 - DNA, 21 bp, Artificial Sequence
  Synthetic: FXN 3 reverse 9:69043497-69043521; SpCas9
gagccagagaggtagaggctg

SEQ ID NO: 39818 - DNA, 20 bp, Artificial Sequence
  Synthetic: FXN 3 reverse 9:69043498-69043521; SpCas9
agccagagaggtagaggctg

SEQ ID NO: 39819 - DNA, 19 bp, Artificial Sequence
  Synthetic: FXN 3 reverse 9:69043499-69043521; SpCas9
gccagagaggtagaggctg

SEQ ID NO: 39820 - DNA, 18 bp, Artificial Sequence
  Synthetic: FXN 3 reverse 9:69043500-69043521; SpCas9
ccagagaggtagaggctg

SEQ ID NO: 39821 - DNA, 25 bp, Artificial Sequence
  Synthetic: FXN 3 reverse 9:69043499-69043527; SpCas9
aggattgcttgagccagagaggtag

SEQ ID NO: 39822 - DNA, 24 bp, Artificial Sequence
  Synthetic: FXN 3 reverse 9:69043500-69043527; SpCas9
ggattgcttgagccagagaggtag

SEQ ID NO: 39823 - DNA, 23 bp, Artificial Sequence
  Synthetic: FXN 3 reverse 9:69043501-69043527; SpCas9
gattgcttgagccagagaggtag

SEQ ID NO: 39824 - DNA, 22 bp, Artificial Sequence
  Synthetic: FXN 3 reverse 9:69043502-69043527; SpCas9
attgcttgagccagagaggtag

SEQ ID NO: 39825 - DNA, 21 bp, Artificial Sequence
  Synthetic: FXN 3 reverse 9:69043503-69043527; SpCas9
ttgcttgagccagagaggtag

SEQ ID NO: 39826 - DNA, 20 bp, Artificial Sequence
  Synthetic: FXN 3 reverse 9:69043504-69043527; SpCas9
tgcttgagccagagaggtag

SEQ ID NO: 39827 - DNA, 19 bp, Artificial Sequence
  Synthetic: FXN 3 reverse 9:69043505-69043527; SpCas9
gcttgagccagagaggtag

SEQ ID NO: 39828 - DNA, 18 bp, Artificial Sequence
  Synthetic: FXN 3 reverse 9:69043506-69043527; SpCas9
cttgagccagagaggtag

SEQ ID NO: 39829 - DNA, 25 bp, Artificial Sequence
  Synthetic: FXN 3 reverse 9:69043500-69043528; SpCas9
gaggattgcttgagccagagaggta

SEQ ID NO: 39830 - DNA, 24 bp, Artificial Sequence
  Synthetic: FXN 3 reverse 9:69043501-69043528; SpCas9
aggattgcttgagccagagaggta

SEQ ID NO: 39831 - DNA, 23 bp, Artificial Sequence
  Synthetic: FXN 3 reverse 9:69043502-69043528; SpCas9
ggattgcttgagccagagaggta

SEQ ID NO: 39832 - DNA, 22 bp, Artificial Sequence
  Synthetic: FXN 3 reverse 9:69043503-69043528; SpCas9
gattgcttgagccagagaggta

SEQ ID NO: 39833 - DNA, 21 bp, Artificial Sequence
  Synthetic: FXN 3 reverse 9:69043504-69043528; SpCas9
attgcttgagccagagaggta

SEQ ID NO: 39834 - DNA, 20 bp, Artificial Sequence
  Synthetic: FXN 3 reverse 9:69043505-69043528; SpCas9
ttgcttgagccagagaggta

SEQ ID NO: 39835 - DNA, 19 bp, Artificial Sequence
  Synthetic: FXN 3 reverse 9:69043506-69043528; SpCas9
tgcttgagccagagaggta

SEQ ID NO: 39836 - DNA, 18 bp, Artificial Sequence
  Synthetic: FXN 3 reverse 9:69043507-69043528; SpCas9
gcttgagccagagaggta

SEQ ID NO: 39837 - DNA, 25 bp, Artificial Sequence
  Synthetic: FXN 3 reverse 9:69043502-69043530; SpCas9
gggaggattgcttgagccagagagg

SEQ ID NO: 39838 - DNA, 24 bp, Artificial Sequence
  Synthetic: FXN 3 reverse 9:69043503-69043530; SpCas9
ggaggattgcttgagccagagagg

SEQ ID NO: 39839 - DNA, 23 bp, Artificial Sequence
  Synthetic: FXN 3 reverse 9:69043504-69043530; SpCas9
gaggattgcttgagccagagagg

SEQ ID NO: 39840 - DNA, 22 bp, Artificial Sequence
  Synthetic: FXN 3 reverse 9:69043505-69043530; SpCas9
aggattgcttgagccagagagg

SEQ ID NO: 39841 - DNA, 21 bp, Artificial Sequence
  Synthetic: FXN 3 reverse 9:69043506-69043530; SpCas9
ggattgcttgagccagagagg

SEQ ID NO: 39842 - DNA, 20 bp, Artificial Sequence
  Synthetic: FXN 3 reverse 9:69043507-69043530; SpCas9
gattgcttgagccagagagg

SEQ ID NO: 39843 - DNA, 19 bp, Artificial Sequence
  Synthetic: FXN 3 reverse 9:69043508-69043530; SpCas9
attgcttgagccagagagg

SEQ ID NO: 39844 - DNA, 18 bp, Artificial Sequence
  Synthetic: FXN 3 reverse 9:69043509-69043530; SpCas9
ttgcttgagccagagagg

SEQ ID NO: 39845 - DNA, 25 bp, Artificial Sequence
  Synthetic: FXN 3 reverse 9:69043505-69043533; SpCas9
ggtgggaggattgcttgagccagag

SEQ ID NO: 39846 - DNA, 24 bp, Artificial Sequence
  Synthetic: FXN 3 reverse 9:69043506-69043533; SpCas9
gtgggaggattgcttgagccagag

SEQ ID NO: 39847 - DNA, 23 bp, Artificial Sequence
  Synthetic: FXN 3 reverse 9:69043507-69043533; SpCas9
tgggaggattgcttgagccagag

SEQ ID NO: 39848 - DNA, 22 bp, Artificial Sequence
  Synthetic: FXN 3 reverse 9:69043508-69043533; SpCas9
gggaggattgcttgagccagag

SEQ ID NO: 39849 - DNA, 21 bp, Artificial Sequence
  Synthetic: FXN 3 reverse 9:69043509-69043533; SpCas9
ggaggattgcttgagccagag

SEQ ID NO: 39850 - DNA, 20 bp, Artificial Sequence
  Synthetic: FXN 3 reverse 9:69043510-69043533; SpCas9
gaggattgcttgagccagag

SEQ ID NO: 39851 - DNA, 19 bp, Artificial Sequence
  Synthetic: FXN 3 reverse 9:69043511-69043533; SpCas9
aggattgcttgagccagag

SEQ ID NO: 39852 - DNA, 18 bp, Artificial Sequence
  Synthetic: FXN 3 reverse 9:69043512-69043533; SpCas9
ggattgcttgagccagag

SEQ ID NO: 39853 - DNA, 25 bp, Artificial Sequence
  Synthetic: FXN 3 reverse 9:69043506-69043534; SpCas9
aggtgggaggattgcttgagccaga

SEQ ID NO: 39854 - DNA, 24 bp, Artificial Sequence
  Synthetic: FXN 3 reverse 9:69043507-69043534; SpCas9
ggtgggaggattgcttgagccaga

SEQ ID NO: 39855 - DNA, 23 bp, Artificial Sequence
  Synthetic: FXN 3 reverse 9:69043508-69043534; SpCas9
gtgggaggattgcttgagccaga

SEQ ID NO: 39856 - DNA, 22 bp, Artificial Sequence
  Synthetic: FXN 3 reverse 9:69043509-69043534; SpCas9
tgggaggattgcttgagccaga

SEQ ID NO: 39857 - DNA, 21 bp, Artificial Sequence
  Synthetic: FXN 3 reverse 9:69043510-69043534; SpCas9
gggaggattgcttgagccaga

SEQ ID NO: 39858 - DNA, 20 bp, Artificial Sequence
  Synthetic: FXN 3 reverse 9:69043511-69043534; SpCas9
ggaggattgcttgagccaga

SEQ ID NO: 39859 - DNA, 19 bp, Artificial Sequence
  Synthetic: FXN 3 reverse 9:69043512-69043534; SpCas9
gaggattgcttgagccaga

SEQ ID NO: 39860 - DNA, 18 bp, Artificial Sequence
  Synthetic: FXN 3 reverse 9:69043513-69043534; SpCas9
aggattgcttgagccaga

SEQ ID NO: 39861 - DNA, 25 bp, Artificial Sequence
  Synthetic: FXN 3 reverse 9:69043508-69043536; SpCas9
cgaggtgggaggattgcttgagcca

SEQ ID NO: 39862 - DNA, 24 bp, Artificial Sequence
  Synthetic: FXN 3 reverse 9:69043509-69043536; SpCas9
gaggtgggaggattgcttgagcca

SEQ ID NO: 39863 - DNA, 23 bp, Artificial Sequence
  Synthetic: FXN 3 reverse 9:69043510-69043536; SpCas9
aggtgggaggattgcttgagcca

SEQ ID NO: 39864 - DNA, 22 bp, Artificial Sequence
  Synthetic: FXN 3 reverse 9:69043511-69043536; SpCas9
ggtgggaggattgcttgagcca

SEQ ID NO: 39865 - DNA, 21 bp, Artificial Sequence
  Synthetic: FXN 3 reverse 9:69043512-69043536; SpCas9
gtgggaggattgcttgagcca

SEQ ID NO: 39866 - DNA, 20 bp, Artificial Sequence
  Synthetic: FXN 3 reverse 9:69043513-69043536; SpCas9
tgggaggattgcttgagcca

SEQ ID NO: 39867 - DNA, 19 bp, Artificial Sequence
  Synthetic: FXN 3 reverse 9:69043514-69043536; SpCas9
gggaggattgcttgagcca

SEQ ID NO: 39868 - DNA, 18 bp, Artificial Sequence
  Synthetic: FXN 3 reverse 9:69043515-69043536; SpCas9
ggaggattgcttgagcca

SEQ ID NO: 39869 - DNA, 25 bp, Artificial Sequence
  Synthetic: FXN 3 forward 9:69043509-69043537; SpCas9
tctggctcaagcaatcctcccacct

SEQ ID NO: 39870 - DNA, 24 bp, Artificial Sequence
  Synthetic: FXN 3 forward 9:69043510-69043537; SpCas9
ctggctcaagcaatcctcccacct

SEQ ID NO: 39871 - DNA, 23 bp, Artificial Sequence
  Synthetic: FXN 3 forward 9:69043511-69043537; SpCas9
tggctcaagcaatcctcccacct

SEQ ID NO: 39872 - DNA, 22 bp, Artificial Sequence
  Synthetic: FXN 3 forward 9:69043512-69043537; SpCas9
ggctcaagcaatcctcccacct

SEQ ID NO: 39873 - DNA, 21 bp, Artificial Sequence
  Synthetic: FXN 3 forward 9:69043513-69043537; SpCas9
gctcaagcaatcctcccacct

SEQ ID NO: 39874 - DNA, 20 bp, Artificial Sequence
  Synthetic: FXN 3 forward 9:69043514-69043537; SpCas9
ctcaagcaatcctcccacct

SEQ ID NO: 39875 - DNA, 19 bp, Artificial Sequence
  Synthetic: FXN 3 forward 9:69043515-69043537; SpCas9
tcaagcaatcctcccacct

SEQ ID NO: 39876 - DNA, 18 bp, Artificial Sequence
  Synthetic: FXN 3 forward 9:69043516-69043537; SpCas9
caagcaatcctcccacct

SEQ ID NO: 39877 - DNA, 25 bp, Artificial Sequence
  Synthetic: FXN 3 reverse 9:69043510-69043538; SpCas9
gccgaggtgggaggattgcttgagc

SEQ ID NO: 39878 - DNA, 24 bp, Artificial Sequence
  Synthetic: FXN 3 reverse 9:69043511-69043538; SpCas9
ccgaggtgggaggattgcttgagc

SEQ ID NO: 39879 - DNA, 23 bp, Artificial Sequence
  Synthetic: FXN 3 reverse 9:69043512-69043538; SpCas9
cgaggtgggaggattgcttgagc

SEQ ID NO: 39880 - DNA, 22 bp, Artificial Sequence
  Synthetic: FXN 3 reverse 9:69043513-69043538; SpCas9
gaggtgggaggattgcttgagc

SEQ ID NO: 39881 - DNA, 21 bp, Artificial Sequence
  Synthetic: FXN 3 reverse 9:69043514-69043538; SpCas9
aggtgggaggattgcttgagc

SEQ ID NO: 39882 - DNA, 20 bp, Artificial Sequence
  Synthetic: FXN 3 reverse 9:69043515-69043538; SpCas9
ggtgggaggattgcttgagc

SEQ ID NO: 39883 - DNA, 19 bp, Artificial Sequence
  Synthetic: FXN 3 reverse 9:69043516-69043538; SpCas9
gtgggaggattgcttgagc

SEQ ID NO: 39884 - DNA, 18 bp, Artificial Sequence
  Synthetic: FXN 3 reverse 9:69043517-69043538; SpCas9
tgggaggattgcttgagc

SEQ ID NO: 39885 - DNA, 25 bp, Artificial Sequence
  Synthetic: FXN 3 reverse 9:69043514-69043542; SpCas9
ggaggccgaggtgggaggattgctt

SEQ ID NO: 39886 - DNA, 24 bp, Artificial Sequence
  Synthetic: FXN 3 reverse 9:69043515-69043542; SpCas9
gaggccgaggtgggaggattgctt

SEQ ID NO: 39887 - DNA, 23 bp, Artificial Sequence
  Synthetic: FXN 3 reverse 9:69043516-69043542; SpCas9
aggccgaggtgggaggattgctt

SEQ ID NO: 39888 - DNA, 22 bp, Artificial Sequence
  Synthetic: FXN 3 reverse 9:69043517-69043542; SpCas9
ggccgaggtgggaggattgctt

SEQ ID NO: 39889 - DNA, 21 bp, Artificial Sequence
  Synthetic: FXN 3 reverse 9:69043518-69043542; SpCas9
gccgaggtgggaggattgctt

SEQ ID NO: 39890 - DNA, 20 bp, Artificial Sequence
  Synthetic: FXN 3 reverse 9:69043519-69043542; SpCas9
ccgaggtgggaggattgctt

SEQ ID NO: 39891 - DNA, 19 bp, Artificial Sequence
  Synthetic: FXN 3 reverse 9:69043520-69043542; SpCas9
cgaggtgggaggattgctt

SEQ ID NO: 39892 - DNA, 18 bp, Artificial Sequence
  Synthetic: FXN 3 reverse 9:69043521-69043542; SpCas9
gaggtgggaggattgctt

SEQ ID NO: 39893 - DNA, 25 bp, Artificial Sequence
  Synthetic: FXN 3 forward 9:69043518-69043546; SpCas9
agcaatcctcccacctcggcctcct

SEQ ID NO: 39894 - DNA, 24 bp, Artificial Sequence
  Synthetic: FXN 3 forward 9:69043519-69043546; SpCas9
gcaatcctcccacctcggcctcct

SEQ ID NO: 39895 - DNA, 23 bp, Artificial Sequence
  Synthetic: FXN 3 forward 9:69043520-69043546; SpCas9
caatcctcccacctcggcctcct

SEQ ID NO: 39896 - DNA, 22 bp, Artificial Sequence
  Synthetic: FXN 3 forward 9:69043521-69043546; SpCas9
aatcctcccacctcggcctcct

SEQ ID NO: 39897 - DNA, 21 bp, Artificial Sequence
  Synthetic: FXN 3 forward 9:69043522-69043546; SpCas9
atcctcccacctcggcctcct

SEQ ID NO: 39898 - DNA, 20 bp, Artificial Sequence
  Synthetic: FXN 3 forward 9:69043523-69043546; SpCas9
tcctcccacctcggcctcct

SEQ ID NO: 39899 - DNA, 19 bp, Artificial Sequence
  Synthetic: FXN 3 forward 9:69043524-69043546; SpCas9
cctcccacctcggcctcct

SEQ ID NO: 39900 - DNA, 18 bp, Artificial Sequence
  Synthetic: FXN 3 forward 9:69043525-69043546; SpCas9
ctcccacctcggcctcct

SEQ ID NO: 39901 - DNA, 25 bp, Artificial Sequence
  Synthetic: FXN 3 forward 9:69043521-69043549; SpCas9
aatcctcccacctcggcctcctgag

SEQ ID NO: 39902 - DNA, 24 bp, Artificial Sequence
  Synthetic: FXN 3 forward 9:69043522-69043549; SpCas9
atcctcccacctcggcctcctgag

SEQ ID NO: 39903 - DNA, 23 bp, Artificial Sequence
  Synthetic: FXN 3 forward 9:69043523-69043549; SpCas9
tcctcccacctcggcctcctgag

SEQ ID NO: 39904 - DNA, 22 bp, Artificial Sequence
  Synthetic: FXN 3 forward 9:69043524-69043549; SpCas9
cctcccacctcggcctcctgag

SEQ ID NO: 39905 - DNA, 21 bp, Artificial Sequence
  Synthetic: FXN 3 forward 9:69043525-69043549; SpCas9
ctcccacctcggcctcctgag

SEQ ID NO: 39906 - DNA, 20 bp, Artificial Sequence
  Synthetic: FXN 3 forward 9:69043526-69043549; SpCas9
tcccacctcggcctcctgag

SEQ ID NO: 39907 - DNA, 19 bp, Artificial Sequence
  Synthetic: FXN 3 forward 9:69043527-69043549; SpCas9
cccacctcggcctcctgag

SEQ ID NO: 39908 - DNA, 18 bp, Artificial Sequence
  Synthetic: FXN 3 forward 9:69043528-69043549; SpCas9
ccacctcggcctcctgag

SEQ ID NO: 39909 - DNA, 25 bp, Artificial Sequence
  Synthetic: FXN 3 reverse 9:69043524-69043552; SpCas9
cagctactcaggaggccgaggtggg

SEQ ID NO: 39910 - DNA, 24 bp, Artificial Sequence
  Synthetic: FXN 3 reverse 9:69043525-69043552; SpCas9
agctactcaggaggccgaggtggg

SEQ ID NO: 39911 - DNA, 23 bp, Artificial Sequence
  Synthetic: FXN 3 reverse 9:69043526-69043552; SpCas9
gctactcaggaggccgaggtggg

SEQ ID NO: 39912 - DNA, 22 bp, Artificial Sequence
  Synthetic: FXN 3 reverse 9:69043527-69043552; SpCas9
ctactcaggaggccgaggtggg

SEQ ID NO: 39913 - DNA, 21 bp, Artificial Sequence
  Synthetic: FXN 3 reverse 9:69043528-69043552; SpCas9
tactcaggaggccgaggtggg

SEQ ID NO: 39914 - DNA, 20 bp, Artificial Sequence
  Synthetic: FXN 3 reverse 9:69043529-69043552; SpCas9
actcaggaggccgaggtggg

SEQ ID NO: 39915 - DNA, 19 bp, Artificial Sequence
  Synthetic: FXN 3 reverse 9:69043530-69043552; SpCas9
ctcaggaggccgaggtggg

SEQ ID NO: 39916 - DNA, 18 bp, Artificial Sequence
  Synthetic: FXN 3 reverse 9:69043531-69043552; SpCas9
tcaggaggccgaggtggg

SEQ ID NO: 39917 - DNA, 25 bp, Artificial Sequence
  Synthetic: FXN 3 forward 9:69043525-69043553; SpCas9
ctcccacctcggcctcctgagtagc

SEQ ID NO: 39918 - DNA, 24 bp, Artificial Sequence
  Synthetic: FXN 3 forward 9:69043526-69043553; SpCas9
tcccacctcggcctcctgagtagc

SEQ ID NO: 39919 - DNA, 23 bp, Artificial Sequence
  Synthetic: FXN 3 forward 9:69043527-69043553; SpCas9
cccacctcggcctcctgagtagc

SEQ ID NO: 39920 - DNA, 22 bp, Artificial Sequence
  Synthetic: FXN 3 forward 9:69043528-69043553; SpCas9
ccacctcggcctcctgagtagc

SEQ ID NO: 39921 - DNA, 21 bp, Artificial Sequence
  Synthetic: FXN 3 forward 9:69043529-69043553; SpCas9
cacctcggcctcctgagtagc

SEQ ID NO: 39922 - DNA, 20 bp, Artificial Sequence
  Synthetic: FXN 3 forward 9:69043530-69043553; SpCas9
acctcggcctcctgagtagc

SEQ ID NO: 39923 - DNA, 19 bp, Artificial Sequence
  Synthetic: FXN 3 forward 9:69043531-69043553; SpCas9
cctcggcctcctgagtagc

SEQ ID NO: 39924 - DNA, 18 bp, Artificial Sequence
  Synthetic: FXN 3 forward 9:69043532-69043553; SpCas9
ctcggcctcctgagtagc

SEQ ID NO: 39925 - DNA, 25 bp, Artificial Sequence
  Synthetic: FXN 3 reverse 9:69043525-69043553; SpCas9
ccagctactcaggaggccgaggtgg

SEQ ID NO: 39926 - DNA, 24 bp, Artificial Sequence
  Synthetic: FXN 3 reverse 9:69043526-69043553; SpCas9
cagctactcaggaggccgaggtgg

SEQ ID NO: 39927 - DNA, 23 bp, Artificial Sequence
  Synthetic: FXN 3 reverse 9:69043527-69043553; SpCas9
agctactcaggaggccgaggtgg

SEQ ID NO: 39928 - DNA, 22 bp, Artificial Sequence
  Synthetic: FXN 3 reverse 9:69043528-69043553; SpCas9
gctactcaggaggccgaggtgg

SEQ ID NO: 39929 - DNA, 21 bp, Artificial Sequence
  Synthetic: FXN 3 reverse 9:69043529-69043553; SpCas9
ctactcaggaggccgaggtgg

SEQ ID NO: 39930 - DNA, 20 bp, Artificial Sequence
  Synthetic: FXN 3 reverse 9:69043530-69043553; SpCas9
tactcaggaggccgaggtgg

SEQ ID NO: 39931 - DNA, 19 bp, Artificial Sequence
  Synthetic: FXN 3 reverse 9:69043531-69043553; SpCas9
actcaggaggccgaggtgg

SEQ ID NO: 39932 - DNA, 18 bp, Artificial Sequence
  Synthetic: FXN 3 reverse 9:69043532-69043553; SpCas9
ctcaggaggccgaggtgg

SEQ ID NO: 39933 - DNA, 25 bp, Artificial Sequence
  Synthetic: FXN 3 forward 9:69043526-69043554; SpCas9
tcccacctcggcctcctgagtagct

SEQ ID NO: 39934 - DNA, 24 bp, Artificial Sequence
  Synthetic: FXN 3 forward 9:69043527-69043554; SpCas9
cccacctcggcctcctgagtagct

SEQ ID NO: 39935 - DNA, 23 bp, Artificial Sequence
  Synthetic: FXN 3 forward 9:69043528-69043554; SpCas9
ccacctcggcctcctgagtagct

SEQ ID NO: 39936 - DNA, 22 bp, Artificial Sequence
  Synthetic: FXN 3 forward 9:69043529-69043554; SpCas9
cacctcggcctcctgagtagct

SEQ ID NO: 39937 - DNA, 21 bp, Artificial Sequence
  Synthetic: FXN 3 forward 9:69043530-69043554; SpCas9
acctcggcctcctgagtagct

SEQ ID NO: 39938 - DNA, 20 bp, Artificial Sequence
  Synthetic: FXN 3 forward 9:69043531-69043554; SpCas9
cctcggcctcctgagtagct

SEQ ID NO: 39939 - DNA, 19 bp, Artificial Sequence
  Synthetic: FXN 3 forward 9:69043532-69043554; SpCas9
ctcggcctcctgagtagct

SEQ ID NO: 39940 - DNA, 18 bp, Artificial Sequence
  Synthetic: FXN 3 forward 9:69043533-69043554; SpCas9
tcggcctcctgagtagct

SEQ ID NO: 39941 - DNA, 25 bp, Artificial Sequence
  Synthetic: FXN 3 reverse 9:69043527-69043555; SpCas9
tcccagctactcaggaggccgaggt

SEQ ID NO: 39942 - DNA, 24 bp, Artificial Sequence
  Synthetic: FXN 3 reverse 9:69043528-69043555; SpCas9
cccagctactcaggaggccgaggt

SEQ ID NO: 39943 - DNA, 23 bp, Artificial Sequence
  Synthetic: FXN 3 reverse 9:69043529-69043555; SpCas9
ccagctactcaggaggccgaggt

SEQ ID NO: 39944 - DNA, 22 bp, Artificial Sequence
  Synthetic: FXN 3 reverse 9:69043530-69043555; SpCas9
cagctactcaggaggccgaggt

SEQ ID NO: 39945 - DNA, 21 bp, Artificial Sequence
  Synthetic: FXN 3 reverse 9:69043531-69043555; SpCas9
agctactcaggaggccgaggt

SEQ ID NO: 39946 - DNA, 20 bp, Artificial Sequence
  Synthetic: FXN 3 reverse 9:69043532-69043555; SpCas9
gctactcaggaggccgaggt

SEQ ID NO: 39947 - DNA, 19 bp, Artificial Sequence
  Synthetic: FXN 3 reverse 9:69043533-69043555; SpCas9
ctactcaggaggccgaggt

SEQ ID NO: 39948 - DNA, 18 bp, Artificial Sequence
  Synthetic: FXN 3 reverse 9:69043534-69043555; SpCas9
tactcaggaggccgaggt

SEQ ID NO: 39949 - DNA, 25 bp, Artificial Sequence
  Synthetic: FXN 3 reverse 9:69043528-69043556; SpCas9
gtcccagctactcaggaggccgagg

SEQ ID NO: 39950 - DNA, 24 bp, Artificial Sequence
  Synthetic: FXN 3 reverse 9:69043529-69043556; SpCas9
tcccagctactcaggaggccgagg

SEQ ID NO: 39951 - DNA, 23 bp, Artificial Sequence
  Synthetic: FXN 3 reverse 9:69043530-69043556; SpCas9
cccagctactcaggaggccgagg

SEQ ID NO: 39952 - DNA, 22 bp, Artificial Sequence
  Synthetic: FXN 3 reverse 9:69043531-69043556; SpCas9
ccagctactcaggaggccgagg

SEQ ID NO: 39953 - DNA, 21 bp, Artificial Sequence
  Synthetic: FXN 3 reverse 9:69043532-69043556; SpCas9
cagctactcaggaggccgagg

SEQ ID NO: 39954 - DNA, 20 bp, Artificial Sequence
  Synthetic: FXN 3 reverse 9:69043533-69043556; SpCas9
agctactcaggaggccgagg

SEQ ID NO: 39955 - DNA, 19 bp, Artificial Sequence
  Synthetic: FXN 3 reverse 9:69043534-69043556; SpCas9
gctactcaggaggccgagg

SEQ ID NO: 39956 - DNA, 18 bp, Artificial Sequence
  Synthetic: FXN 3 reverse 9:69043535-69043556; SpCas9
ctactcaggaggccgagg

SEQ ID NO: 39957 - DNA, 25 bp, Artificial Sequence
  Synthetic: FXN 3 reverse 9:69043531-69043559; SpCas9
gtagtcccagctactcaggaggccg

SEQ ID NO: 39958 - DNA, 24 bp, Artificial Sequence
  Synthetic: FXN 3 reverse 9:69043532-69043559; SpCas9
tagtcccagctactcaggaggccg

SEQ ID NO: 39959 - DNA, 23 bp, Artificial Sequence
  Synthetic: FXN 3 reverse 9:69043533-69043559; SpCas9
agtcccagctactcaggaggccg

SEQ ID NO: 39960 - DNA, 22 bp, Artificial Sequence
  Synthetic: FXN 3 reverse 9:69043534-69043559; SpCas9
gtcccagctactcaggaggccg

SEQ ID NO: 39961 - DNA, 21 bp, Artificial Sequence
  Synthetic: FXN 3 reverse 9:69043535-69043559; SpCas9
tcccagctactcaggaggccg

SEQ ID NO: 39962 - DNA, 20 bp, Artificial Sequence
  Synthetic: FXN 3 reverse 9:69043536-69043559; SpCas9
cccagctactcaggaggccg

SEQ ID NO: 39963 - DNA, 19 bp, Artificial Sequence
  Synthetic: FXN 3 reverse 9:69043537-69043559; SpCas9
ccagctactcaggaggccg

SEQ ID NO: 39964 - DNA, 18 bp, Artificial Sequence
  Synthetic: FXN 3 reverse 9:69043538-69043559; SpCas9
cagctactcaggaggccg

SEQ ID NO: 39965 - DNA, 25 bp, Artificial Sequence
  Synthetic: FXN 3 reverse 9:69043532-69043560; SpCas9
tgtagtcccagctactcaggaggcc

SEQ ID NO: 39966 - DNA, 24 bp, Artificial Sequence
  Synthetic: FXN 3 reverse 9:69043533-69043560; SpCas9
gtagtcccagctactcaggaggcc

SEQ ID NO: 39967 - DNA, 23 bp, Artificial Sequence
  Synthetic: FXN 3 reverse 9:69043534-69043560; SpCas9
tagtcccagctactcaggaggcc

SEQ ID NO: 39968 - DNA, 22 bp, Artificial Sequence
  Synthetic: FXN 3 reverse 9:69043535-69043560; SpCas9
agtcccagctactcaggaggcc

SEQ ID NO: 39969 - DNA, 21 bp, Artificial Sequence
  Synthetic: FXN 3 reverse 9:69043536-69043560; SpCas9
gtcccagctactcaggaggcc

SEQ ID NO: 39970 - DNA, 20 bp, Artificial Sequence
  Synthetic: FXN 3 reverse 9:69043537-69043560; SpCas9
tcccagctactcaggaggcc

SEQ ID NO: 39971 - DNA, 19 bp, Artificial Sequence
  Synthetic: FXN 3 reverse 9:69043538-69043560; SpCas9
cccagctactcaggaggcc

SEQ ID NO: 39972 - DNA, 18 bp, Artificial Sequence
  Synthetic: FXN 3 reverse 9:69043539-69043560; SpCas9
ccagctactcaggaggcc

SEQ ID NO: 39973 - DNA, 25 bp, Artificial Sequence
  Synthetic: FXN 3 forward 9:69043533-69043561; SpCas9
tcggcctcctgagtagctgggacta

SEQ ID NO: 39974 - DNA, 24 bp, Artificial Sequence
  Synthetic: FXN 3 forward 9:69043534-69043561; SpCas9
cggcctcctgagtagctgggacta

SEQ ID NO: 39975 - DNA, 23 bp, Artificial Sequence
  Synthetic: FXN 3 forward 9:69043535-69043561; SpCas9
ggcctcctgagtagctgggacta

SEQ ID NO: 39976 - DNA, 22 bp, Artificial Sequence
  Synthetic: FXN 3 forward 9:69043536-69043561; SpCas9
gcctcctgagtagctgggacta

SEQ ID NO: 39977 - DNA, 21 bp, Artificial Sequence
  Synthetic: FXN 3 forward 9:69043537-69043561; SpCas9
cctcctgagtagctgggacta

SEQ ID NO: 39978 - DNA, 20 bp, Artificial Sequence
  Synthetic: FXN 3 forward 9:69043538-69043561; SpCas9
ctcctgagtagctgggacta

SEQ ID NO: 39979 - DNA, 19 bp, Artificial Sequence
  Synthetic: FXN 3 forward 9:69043539-69043561; SpCas9
tcctgagtagctgggacta

SEQ ID NO: 39980 - DNA, 18 bp, Artificial Sequence
  Synthetic: FXN 3 forward 9:69043540-69043561; SpCas9
cctgagtagctgggacta

SEQ ID NO: 39981 - DNA, 25 bp, Artificial Sequence
  Synthetic: FXN 3 forward 9:69043534-69043562; SpCas9
cggcctcctgagtagctgggactac

SEQ ID NO: 39982 - DNA, 24 bp, Artificial Sequence
  Synthetic: FXN 3 forward 9:69043535-69043562; SpCas9
ggcctcctgagtagctgggactac

SEQ ID NO: 39983 - DNA, 23 bp, Artificial Sequence
  Synthetic: FXN 3 forward 9:69043536-69043562; SpCas9
gcctcctgagtagctgggactac

SEQ ID NO: 39984 - DNA, 22 bp, Artificial Sequence
  Synthetic: FXN 3 forward 9:69043537-69043562; SpCas9
cctcctgagtagctgggactac

SEQ ID NO: 39985 - DNA, 21 bp, Artificial Sequence
  Synthetic: FXN 3 forward 9:69043538-69043562; SpCas9
ctcctgagtagctgggactac

SEQ ID NO: 39986 - DNA, 20 bp, Artificial Sequence
  Synthetic: FXN 3 forward 9:69043539-69043562; SpCas9
tcctgagtagctgggactac

SEQ ID NO: 39987 - DNA, 19 bp, Artificial Sequence
  Synthetic: FXN 3 forward 9:69043540-69043562; SpCas9
cctgagtagctgggactac

SEQ ID NO: 39988 - DNA, 18 bp, Artificial Sequence
  Synthetic: FXN 3 forward 9:69043541-69043562; SpCas9
ctgagtagctgggactac

SEQ ID NO: 39989 - DNA, 25 bp, Artificial Sequence
  Synthetic: FXN 3 reverse 9:69043537-69043565; SpCas9
gtacctgtagtcccagctactcagg

SEQ ID NO: 39990 - DNA, 24 bp, Artificial Sequence
  Synthetic: FXN 3 reverse 9:69043538-69043565; SpCas9
tacctgtagtcccagctactcagg

SEQ ID NO: 39991 - DNA, 23 bp, Artificial Sequence
  Synthetic: FXN 3 reverse 9:69043539-69043565; SpCas9
acctgtagtcccagctactcagg

SEQ ID NO: 39992 - DNA, 22 bp, Artificial Sequence
  Synthetic: FXN 3 reverse 9:69043540-69043565; SpCas9
cctgtagtcccagctactcagg

SEQ ID NO: 39993 - DNA, 21 bp, Artificial Sequence
  Synthetic: FXN 3 reverse 9:69043541-69043565; SpCas9
ctgtagtcccagctactcagg

SEQ ID NO: 39994 - DNA, 20 bp, Artificial Sequence
  Synthetic: FXN 3 reverse 9:69043542-69043565; SpCas9
tgtagtcccagctactcagg

SEQ ID NO: 39995 - DNA, 19 bp, Artificial Sequence
  Synthetic: FXN 3 reverse 9:69043543-69043565; SpCas9
gtagtcccagctactcagg

SEQ ID NO: 39996 - DNA, 18 bp, Artificial Sequence
  Synthetic: FXN 3 reverse 9:69043544-69043565; SpCas9
tagtcccagctactcagg

SEQ ID NO: 39997 - DNA, 25 bp, Artificial Sequence
  Synthetic: FXN 3 reverse 9:69043538-69043566; SpCas9
tgtacctgtagtcccagctactcag

SEQ ID NO: 39998 - DNA, 24 bp, Artificial Sequence
  Synthetic: FXN 3 reverse 9:69043539-69043566; SpCas9
gtacctgtagtcccagctactcag

SEQ ID NO: 39999 - DNA, 23 bp, Artificial Sequence
  Synthetic: FXN 3 reverse 9:69043540-69043566; SpCas9
tacctgtagtcccagctactcag

SEQ ID NO: 40000 - DNA, 22 bp, Artificial Sequence
  Synthetic: FXN 3 reverse 9:69043541-69043566; SpCas9s
acctgtagtcccagctactcag

SEQ ID NO: 40001 - DNA, 21 bp, Artificial Sequence
  Synthetic: FXN 3 reverse 9:69043542-69043566; SpCas9
cctgtagtcccagctactcag

SEQ ID NO: 40002 - DNA, 20 bp, Artificial Sequence
  Synthetic: FXN 3 reverse 9:69043543-69043566; SpCas9
ctgtagtcccagctactcag

SEQ ID NO: 40003 - DNA, 19 bp, Artificial Sequence
  Synthetic: FXN 3 reverse 9:69043544-69043566; SpCas9
tgtagtcccagctactcag

SEQ ID NO: 40004 - DNA, 18 bp, Artificial Sequence
  Synthetic: FXN 3 reverse 9:69043545-69043566; SpCas9
gtagtcccagctactcag

SEQ ID NO: 40005 - DNA, 25 bp, Artificial Sequence
  Synthetic: FXN 3 reverse 9:69043540-69043568; SpCas9
ggtgtacctgtagtcccagctactc

SEQ ID NO: 40006 - DNA, 24 bp, Artificial Sequence
  Synthetic: FXN 3 reverse 9:69043541-69043568; SpCas9
gtgtacctgtagtcccagctactc

SEQ ID NO: 40007 - DNA, 23 bp, Artificial Sequence
  Synthetic: FXN 3 reverse 9:69043542-69043568; SpCas9
tgtacctgtagtcccagctactc

SEQ ID NO: 40008 - DNA, 22 bp, Artificial Sequence
  Synthetic: FXN 3 reverse 9:69043543-69043568; SpCas9
gtacctgtagtcccagctactc

SEQ ID NO: 40009 - DNA, 21 bp, Artificial Sequence
  Synthetic: FXN 3 reverse 9:69043544-69043568; SpCas9
tacctgtagtcccagctactc

SEQ ID NO: 40010 - DNA, 20 bp, Artificial Sequence
  Synthetic: FXN 3 reverse 9:69043545-69043568; SpCas9
acctgtagtcccagctactc

SEQ ID NO: 40011 - DNA, 19 bp, Artificial Sequence
  Synthetic: FXN 3 reverse 9:69043546-69043568; SpCas9
cctgtagtcccagctactc

SEQ ID NO: 40012 - DNA, 18 bp, Artificial Sequence
  Synthetic: FXN 3 reverse 9:69043547-69043568; SpCas9
ctgtagtcccagctactc

SEQ ID NO: 40013 - DNA, 25 bp, Artificial Sequence
  Synthetic: FXN 3 reverse 9:69043541-69043569; SpCas9
gggtgtacctgtagtcccagctact

SEQ ID NO: 40014 - DNA, 24 bp, Artificial Sequence
  Synthetic: FXN 3 reverse 9:69043542-69043569; SpCas9
ggtgtacctgtagtcccagctact

SEQ ID NO: 40015 - DNA, 23 bp, Artificial Sequence
  Synthetic: FXN 3 reverse 9:69043543-69043569; SpCas9
gtgtacctgtagtcccagctact

SEQ ID NO: 40016 - DNA, 22 bp, Artificial Sequence
  Synthetic: FXN 3 reverse 9:69043544-69043569; SpCas9
tgtacctgtagtcccagctact

SEQ ID NO: 40017 - DNA, 21 bp, Artificial Sequence
  Synthetic: FXN 3 reverse 9:69043545-69043569; SpCas9
gtacctgtagtcccagctact

SEQ ID NO: 40018 - DNA, 20 bp, Artificial Sequence
  Synthetic: FXN 3 reverse 9:69043546-69043569; SpCas9
tacctgtagtcccagctact

SEQ ID NO: 40019 - DNA, 19 bp, Artificial Sequence
  Synthetic: FXN 3 reverse 9:69043547-69043569; SpCas9
acctgtagtcccagctact

SEQ ID NO: 40020 - DNA, 18 bp, Artificial Sequence
  Synthetic: FXN 3 reverse 9:69043548-69043569; SpCas9
cctgtagtcccagctact

SEQ ID NO: 40021 - DNA, 25 bp, Artificial Sequence
  Synthetic: FXN 3 reverse 9:69043549-69043577; SpCas9
gtgtggtggggtgtacctgtagtcc

SEQ ID NO: 40022 - DNA, 24 bp, Artificial Sequence
  Synthetic: FXN 3 reverse 9:69043550-69043577; SpCas9
tgtggtggggtgtacctgtagtcc

SEQ ID NO: 40023 - DNA, 23 bp, Artificial Sequence
  Synthetic: FXN 3 reverse 9:69043551-69043577; SpCas9
gtggtggggtgtacctgtagtcc

SEQ ID NO: 40024 - DNA, 22 bp, Artificial Sequence
  Synthetic: FXN 3 reverse 9:69043552-69043577; SpCas9
tggtggggtgtacctgtagtcc

SEQ ID NO: 40025 - DNA, 21 bp, Artificial Sequence
  Synthetic: FXN 3 reverse 9:69043553-69043577; SpCas9
ggtggggtgtacctgtagtcc

SEQ ID NO: 40026 - DNA, 20 bp, Artificial Sequence
  Synthetic: FXN 3 reverse 9:69043554-69043577; SpCas9
gtggggtgtacctgtagtcc

SEQ ID NO: 40027 - DNA, 19 bp, Artificial Sequence
  Synthetic: FXN 3 reverse 9:69043555-69043577; SpCas9
tggggtgtacctgtagtcc

SEQ ID NO: 40028 - DNA, 18 bp, Artificial Sequence
  Synthetic: FXN 3 reverse 9:69043556-69043577; SpCas9
ggggtgtacctgtagtcc

SEQ ID NO: 40029 - DNA, 25 bp, Artificial Sequence
  Synthetic: FXN 3 forward 9:69043553-69043581; SpCas9
gactacaggtacaccccaccacacc

SEQ ID NO: 40030 - DNA, 24 bp, Artificial Sequence
  Synthetic: FXN 3 forward 9:69043554-69043581; SpCas9
actacaggtacaccccaccacacc

SEQ ID NO: 40031 - DNA, 23 bp, Artificial Sequence
  Synthetic: FXN 3 forward 9:69043555-69043581; SpCas9
ctacaggtacaccccaccacacc

SEQ ID NO: 40032 - DNA, 22 bp, Artificial Sequence
  Synthetic: FXN 3 forward 9:69043556-69043581; SpCas9
tacaggtacaccccaccacacc

SEQ ID NO: 40033 - DNA, 21 bp, Artificial Sequence
  Synthetic: FXN 3 forward 9:69043557-69043581; SpCas9
acaggtacaccccaccacacc

SEQ ID NO: 40034 - DNA, 20 bp, Artificial Sequence
  Synthetic: FXN 3 forward 9:69043558-69043581; SpCas9
caggtacaccccaccacacc

SEQ ID NO: 40035 - DNA, 19 bp, Artificial Sequence
  Synthetic: FXN 3 forward 9:69043559-69043581; SpCas9
aggtacaccccaccacacc

SEQ ID NO: 40036 - DNA, 18 bp, Artificial Sequence
  Synthetic: FXN 3 forward 9:69043560-69043581; SpCas9
ggtacaccccaccacacc

SEQ ID NO: 40037 - DNA, 25 bp, Artificial Sequence
  Synthetic: FXN 3 reverse 9:69043555-69043583; SpCas9
atctgggtgtggtggggtgtacctg

SEQ ID NO: 40038 - DNA, 24 bp, Artificial Sequence
  Synthetic: FXN 3 reverse 9:69043556-69043583; SpCas9
tctgggtgtggtggggtgtacctg

SEQ ID NO: 40039 - DNA, 23 bp, Artificial Sequence
  Synthetic: FXN 3 reverse 9:69043557-69043583; SpCas9
ctgggtgtggtggggtgtacctg

SEQ ID NO: 40040 - DNA, 22 bp, Artificial Sequence
  Synthetic: FXN 3 reverse 9:69043558-69043583; SpCas9
tgggtgtggtggggtgtacctg

SEQ ID NO: 40041 - DNA, 21 bp, Artificial Sequence
  Synthetic: FXN 3 reverse 9:69043559-69043583; SpCas9
gggtgtggtggggtgtacctg

SEQ ID NO: 40042 - DNA, 20 bp, Artificial Sequence
  Synthetic: FXN 3 reverse 9:69043560-69043583; SpCas9
ggtgtggtggggtgtacctg

SEQ ID NO: 40043 - DNA, 19 bp, Artificial Sequence
  Synthetic: FXN 3 reverse 9:69043561-69043583; SpCas9
gtgtggtggggtgtacctg

SEQ ID NO: 40044 - DNA, 18 bp, Artificial Sequence
  Synthetic: FXN 3 reverse 9:69043562-69043583; SpCas9
tgtggtggggtgtacctg

SEQ ID NO: 40045 - DNA, 25 bp, Artificial Sequence
  Synthetic: FXN 3 reverse 9:69043566-69043594; SpCas9
tcaaaaacattatctgggtgtggtg

SEQ ID NO: 40046 - DNA, 24 bp, Artificial Sequence
  Synthetic: FXN 3 reverse 9:69043567-69043594; SpCas9
caaaaacattatctgggtgtggtg

SEQ ID NO: 40047 - DNA, 23 bp, Artificial Sequence
  Synthetic: FXN 3 reverse 9:69043568-69043594; SpCas9
aaaaacattatctgggtgtggtg

SEQ ID NO: 40048 - DNA, 22 bp, Artificial Sequence
  Synthetic: FXN 3 reverse 9:69043569-69043594; SpCas9
aaaacattatctgggtgtggtg

SEQ ID NO: 40049 - DNA, 21 bp, Artificial Sequence
  Synthetic: FXN 3 reverse 9:69043570-69043594; SpCas9
aaacattatctgggtgtggtg

SEQ ID NO: 40050 - DNA, 20 bp, Artificial Sequence
  Synthetic: FXN 3 reverse 9:69043571-69043594; SpCas9
aacattatctgggtgtggtg

SEQ ID NO: 40051 - DNA, 19 bp, Artificial Sequence
  Synthetic: FXN 3 reverse 9:69043572-69043594; SpCas9
acattatctgggtgtggtg

SEQ ID NO: 40052 - DNA, 18 bp, Artificial Sequence
  Synthetic: FXN 3 reverse 9:69043573-69043594; SpCas9
cattatctgggtgtggtg

SEQ ID NO: 40053 - DNA, 25 bp, Artificial Sequence
  Synthetic: FXN 3 reverse 9:69043567-69043595; SpCas9
atcaaaaacattatctgggtgtggt

SEQ ID NO: 40054 - DNA, 24 bp, Artificial Sequence
  Synthetic: FXN 3 reverse 9:69043568-69043595; SpCas9
tcaaaaacattatctgggtgtggt

SEQ ID NO: 40055 - DNA, 23 bp, Artificial Sequence
  Synthetic: FXN 3 reverse 9:69043569-69043595; SpCas9
caaaaacattatctgggtgtggt

SEQ ID NO: 40056 - DNA, 22 bp, Artificial Sequence
  Synthetic: FXN 3 reverse 9:69043570-69043595; SpCas9
aaaaacattatctgggtgtggt

SEQ ID NO: 40057 - DNA, 21 bp, Artificial Sequence
  Synthetic: FXN 3 reverse 9:69043571-69043595; SpCas9
aaaacattatctgggtgtggt

SEQ ID NO: 40058 - DNA, 20 bp, Artificial Sequence
  Synthetic: FXN 3 reverse 9:69043572-69043595; SpCas9
aaacattatctgggtgtggt

SEQ ID NO: 40059 - DNA, 19 bp, Artificial Sequence
  Synthetic: FXN 3 reverse 9:69043573-69043595; SpCas9
aacattatctgggtgtggt

SEQ ID NO: 40060 - DNA, 18 bp, Artificial Sequence
  Synthetic: FXN 3 reverse 9:69043574-69043595; SpCas9
acattatctgggtgtggt

SEQ ID NO: 40061 - DNA, 25 bp, Artificial Sequence
  Synthetic: FXN 3 reverse 9:69043568-69043596; SpCas9
tatcaaaaacattatctgggtgtgg

SEQ ID NO: 40062 - DNA, 24 bp, Artificial Sequence
  Synthetic: FXN 3 reverse 9:69043569-69043596; SpCas9
atcaaaaacattatctgggtgtgg

SEQ ID NO: 40063 - DNA, 23 bp, Artificial Sequence
  Synthetic: FXN 3 reverse 9:69043570-69043596; SpCas9
tcaaaaacattatctgggtgtgg

SEQ ID NO: 40064 - DNA, 22 bp, Artificial Sequence
  Synthetic: FXN 3 reverse 9:69043571-69043596; SpCas9
caaaaacattatctgggtgtgg

SEQ ID NO: 40065 - DNA, 21 bp, Artificial Sequence
  Synthetic: FXN 3 reverse 9:69043572-69043596; SpCas9
aaaaacattatctgggtgtgg

SEQ ID NO: 40066 - DNA, 20 bp, Artificial Sequence
  Synthetic: FXN 3 reverse 9:69043573-69043596; SpCas9
aaaacattatctgggtgtgg

SEQ ID NO: 40067 - DNA, 19 bp, Artificial Sequence
  Synthetic: FXN 3 reverse 9:69043574-69043596; SpCas9
aaacattatctgggtgtgg

SEQ ID NO: 40068 - DNA, 18 bp, Artificial Sequence
  Synthetic: FXN 3 reverse 9:69043575-69043596; SpCas9
aacattatctgggtgtgg

SEQ ID NO: 40069 - DNA, 25 bp, Artificial Sequence
  Synthetic: FXN 3 reverse 9:69043571-69043599; SpCas9
aaatatcaaaaacattatctgggtg

SEQ ID NO: 40070 - DNA, 24 bp, Artificial Sequence
  Synthetic: FXN 3 reverse 9:69043572-69043599; SpCas9
aatatcaaaaacattatctgggtg

SEQ ID NO: 40071 - DNA, 23 bp, Artificial Sequence
  Synthetic: FXN 3 reverse 9:69043573-69043599; SpCas9
atatcaaaaacattatctgggtg

SEQ ID NO: 40072 - DNA, 22 bp, Artificial Sequence
  Synthetic: FXN 3 reverse 9:69043574-69043599; SpCas9
tatcaaaaacattatctgggtg

SEQ ID NO: 40073 - DNA, 21 bp, Artificial Sequence
  Synthetic: FXN 3 reverse 9:69043575-69043599; SpCas9
atcaaaaacattatctgggtg

SEQ ID NO: 40074 - DNA, 20 bp, Artificial Sequence
  Synthetic: FXN 3 reverse 9:69043576-69043599; SpCas9
tcaaaaacattatctgggtg

SEQ ID NO: 40075 - DNA, 19 bp, Artificial Sequence
  Synthetic: FXN 3 reverse 9:69043577-69043599; SpCas9
caaaaacattatctgggtg

SEQ ID NO: 40076 - DNA, 18 bp, Artificial Sequence
  Synthetic: FXN 3 reverse 9:69043578-69043599; SpCas9
aaaaacattatctgggtg

SEQ ID NO: 40077 - DNA, 25 bp, Artificial Sequence
  Synthetic: FXN 3 reverse 9:69043576-69043604; SpCas9
taaaaaaatatcaaaaacattatct

SEQ ID NO: 40078 - DNA, 24 bp, Artificial Sequence
  Synthetic: FXN 3 reverse 9:69043577-69043604; SpCas9
aaaaaaatatcaaaaacattatct

SEQ ID NO: 40079 - DNA, 23 bp, Artificial Sequence
  Synthetic: FXN 3 reverse 9:69043578-69043604; SpCas9
aaaaaatatcaaaaacattatct

SEQ ID NO: 40080 - DNA, 22 bp, Artificial Sequence
  Synthetic: FXN 3 reverse 9:69043579-69043604; SpCas9
aaaaatatcaaaaacattatct

SEQ ID NO: 40081 - DNA, 21 bp, Artificial Sequence
  Synthetic: FXN 3 reverse 9:69043580-69043604; SpCas9
aaaatatcaaaaacattatct

SEQ ID NO: 40082 - DNA, 20 bp, Artificial Sequence
  Synthetic: FXN 3 reverse 9:69043581-69043604; SpCas9
aaatatcaaaaacattatct

SEQ ID NO: 40083 - DNA, 19 bp, Artificial Sequence
  Synthetic: FXN 3 reverse 9:69043582-69043604; SpCas9
aatatcaaaaacattatct

SEQ ID NO: 40084 - DNA, 18 bp, Artificial Sequence
  Synthetic: FXN 3 reverse 9:69043583-69043604; SpCas9
atatcaaaaacattatct

SEQ ID NO: 40085 - DNA, 25 bp, Artificial Sequence
  Synthetic: FXN 3 forward 9:69043577-69043605; SpCas9
ccagataatgtttttgatatttttt

SEQ ID NO: 40086 - DNA, 24 bp, Artificial Sequence
  Synthetic: FXN 3 forward 9:69043578-69043605; SpCas9
cagataatgtttttgatatttttt

SEQ ID NO: 40087 - DNA, 23 bp, Artificial Sequence
  Synthetic: FXN 3 forward 9:69043579-69043605; SpCas9
agataatgtttttgatatttttt

SEQ ID NO: 40088 - DNA, 22 bp, Artificial Sequence
  Synthetic: FXN 3 forward 9:69043580-69043605; SpCas9
gataatgtttttgatatttttt

SEQ ID NO: 40089 - DNA, 21 bp, Artificial Sequence
  Synthetic: FXN 3 forward 9:69043581-69043605; SpCas9
ataatgtttttgatatttttt

SEQ ID NO: 40090 - DNA, 20 bp, Artificial Sequence
  Synthetic: FXN 3 forward 9:69043582-69043605; SpCas9
taatgtttttgatatttttt

SEQ ID NO: 40091 - DNA, 19 bp, Artificial Sequence
  Synthetic: FXN 3 forward 9:69043583-69043605; SpCas9
aatgtttttgatatttttt

SEQ ID NO: 40092 - DNA, 18 bp, Artificial Sequence
  Synthetic: FXN 3 forward 9:69043584-69043605; SpCas9
atgtttttgatatttttt

SEQ ID NO: 40093 - DNA, 25 bp, Artificial Sequence
  Synthetic: FXN 3 reverse 9:69043577-69043605; SpCas9
ctaaaaaaatatcaaaaacattatc

SEQ ID NO: 40094 - DNA, 24 bp, Artificial Sequence
  Synthetic: FXN 3 reverse 9:69043578-69043605; SpCas9
taaaaaaatatcaaaaacattatc

SEQ ID NO: 40095 - DNA, 23 bp, Artificial Sequence
  Synthetic: FXN 3 reverse 9:69043579-69043605; SpCas9
aaaaaaatatcaaaaacattatc

SEQ ID NO: 40096 - DNA, 22 bp, Artificial Sequence
  Synthetic: FXN 3 reverse 9:69043580-69043605; SpCas9
aaaaaatatcaaaaacattatc

SEQ ID NO: 40097 - DNA, 21 bp, Artificial Sequence
  Synthetic: FXN 3 reverse 9:69043581-69043605; SpCas9
aaaaatatcaaaaacattatc

SEQ ID NO: 40098 - DNA, 20 bp, Artificial Sequence
  Synthetic: FXN 3 reverse 9:69043582-69043605; SpCas9
aaaatatcaaaaacattatc

SEQ ID NO: 40099 - DNA, 19 bp, Artificial Sequence
  Synthetic: FXN 3 reverse 9:69043583-69043605; SpCas9
aaatatcaaaaacattatc

SEQ ID NO: 40100 - DNA, 18 bp, Artificial Sequence
  Synthetic: FXN 3 reverse 9:69043584-69043605; SpCas9
aatatcaaaaacattatc

SEQ ID NO: 40101 - DNA, 25 bp, Artificial Sequence
  Synthetic: FXN 3 forward 9:69043578-69043606; SpCas9
cagataatgtttttgatattttttt

SEQ ID NO: 40102 - DNA, 24 bp, Artificial Sequence
  Synthetic: FXN 3 forward 9:69043579-69043606; SpCas9
agataatgtttttgatattttttt

SEQ ID NO: 40103 - DNA, 23 bp, Artificial Sequence
  Synthetic: FXN 3 forward 9:69043580-69043606; SpCas9
gataatgtttttgatattttttt

SEQ ID NO: 40104 - DNA, 22 bp, Artificial Sequence
  Synthetic: FXN 3 forward 9:69043581-69043606; SpCas9
ataatgtttttgatattttttt

SEQ ID NO: 40105 - DNA, 21 bp, Artificial Sequence
  Synthetic: FXN 3 forward 9:69043582-69043606; SpCas9
taatgtttttgatattttttt

SEQ ID NO: 40106 - DNA, 20 bp, Artificial Sequence
  Synthetic: FXN 3 forward 9:69043583-69043606; SpCas9
aatgtttttgatattttttt

SEQ ID NO: 40107 - DNA, 19 bp, Artificial Sequence
  Synthetic: FXN 3 forward 9:69043584-69043606; SpCas9
atgtttttgatattttttt

SEQ ID NO: 40108 - DNA, 18 bp, Artificial Sequence
  Synthetic: FXN 3 forward 9:69043585-69043606; SpCas9
tgtttttgatattttttt

SEQ ID NO: 40109 - DNA, 25 bp, Artificial Sequence
  Synthetic: FXN 3 forward 9:69043581-69043609; SpCas9
ataatgtttttgatatttttttagg

SEQ ID NO: 40110 - DNA, 24 bp, Artificial Sequence
  Synthetic: FXN 3 forward 9:69043582-69043609; SpCas9
taatgtttttgatatttttttagg

SEQ ID NO: 40111 - DNA, 23 bp, Artificial Sequence
  Synthetic: FXN 3 forward 9:69043583-69043609; SpCas9
aatgtttttgatatttttttagg

SEQ ID NO: 40112 - DNA, 22 bp, Artificial Sequence
  Synthetic: FXN 3 forward 9:69043584-69043609; SpCas9
atgtttttgatatttttttagg

SEQ ID NO: 40113 - DNA, 21 bp, Artificial Sequence
  Synthetic: FXN 3 forward 9:69043585-69043609; SpCas9
tgtttttgatatttttttagg

SEQ ID NO: 40114 - DNA, 20 bp, Artificial Sequence
  Synthetic: FXN 3 forward 9:69043586-69043609; SpCas9
gtttttgatatttttttagg

SEQ ID NO: 40115 - DNA, 19 bp, Artificial Sequence
  Synthetic: FXN 3 forward 9:69043587-69043609; SpCas9
tttttgatatttttttagg

SEQ ID NO: 40116 - DNA, 18 bp, Artificial Sequence
  Synthetic: FXN 3 forward 9:69043588-69043609; SpCas9
ttttgatatttttttagg

SEQ ID NO: 40117 - DNA, 25 bp, Artificial Sequence
  Synthetic: FXN 3 forward 9:69043600-69043628; SpCas9
tttaggtggaattttgctcatcacc

SEQ ID NO: 40118 - DNA, 24 bp, Artificial Sequence
  Synthetic: FXN 3 forward 9:69043601-69043628; SpCas9
ttaggtggaattttgctcatcacc

SEQ ID NO: 40119 - DNA, 23 bp, Artificial Sequence
  Synthetic: FXN 3 forward 9:69043602-69043628; SpCas9
taggtggaattttgctcatcacc

SEQ ID NO: 40120 - DNA, 22 bp, Artificial Sequence
  Synthetic: FXN 3 forward 9:69043603-69043628; SpCas9
aggtggaattttgctcatcacc

SEQ ID NO: 40121 - DNA, 21 bp, Artificial Sequence
  Synthetic: FXN 3 forward 9:69043604-69043628; SpCas9
ggtggaattttgctcatcacc

SEQ ID NO: 40122 - DNA, 20 bp, Artificial Sequence
  Synthetic: FXN 3 forward 9:69043605-69043628; SpCas9
gtggaattttgctcatcacc

SEQ ID NO: 40123 - DNA, 19 bp, Artificial Sequence
  Synthetic: FXN 3 forward 9:69043606-69043628; SpCas9
tggaattttgctcatcacc

SEQ ID NO: 40124 - DNA, 18 bp, Artificial Sequence
  Synthetic: FXN 3 forward 9:69043607-69043628; SpCas9
ggaattttgctcatcacc

SEQ ID NO: 40125 - DNA, 25 bp, Artificial Sequence
  Synthetic: FXN 3 forward 9:69043601-69043629; SpCas9
ttaggtggaattttgctcatcaccc

SEQ ID NO: 40126 - DNA, 24 bp, Artificial Sequence
  Synthetic: FXN 3 forward 9:69043602-69043629; SpCas9
taggtggaattttgctcatcaccc

SEQ ID NO: 40127 - DNA, 23 bp, Artificial Sequence
  Synthetic: FXN 3 forward 9:69043603-69043629; SpCas9
aggtggaattttgctcatcaccc

SEQ ID NO: 40128 - DNA, 22 bp, Artificial Sequence
  Synthetic: FXN 3 forward 9:69043604-69043629; SpCas9
ggtggaattttgctcatcaccc

SEQ ID NO: 40129 - DNA, 21 bp, Artificial Sequence
  Synthetic: FXN 3 forward 9:69043605-69043629; SpCas9
gtggaattttgctcatcaccc

SEQ ID NO: 40130 - DNA, 20 bp, Artificial Sequence
  Synthetic: FXN 3 forward 9:69043606-69043629; SpCas9
tggaattttgctcatcaccc

SEQ ID NO: 40131 - DNA, 19 bp, Artificial Sequence
  Synthetic: FXN 3 forward 9:69043607-69043629; SpCas9
ggaattttgctcatcaccc

SEQ ID NO: 40132 - DNA, 18 bp, Artificial Sequence
  Synthetic: FXN 3 forward 9:69043608-69043629; SpCas9
gaattttgctcatcaccc

SEQ ID NO: 40133 - DNA, 25 bp, Artificial Sequence
  Synthetic: FXN 3 forward 9:69043605-69043633; SpCas9
gtggaattttgctcatcacccaggc

SEQ ID NO: 40134 - DNA, 24 bp, Artificial Sequence
  Synthetic: FXN 3 forward 9:69043606-69043633; SpCas9
tggaattttgctcatcacccaggc

SEQ ID NO: 40135 - DNA, 23 bp, Artificial Sequence
  Synthetic: FXN 3 forward 9:69043607-69043633; SpCas9
ggaattttgctcatcacccaggc

SEQ ID NO: 40136 - DNA, 22 bp, Artificial Sequence
  Synthetic: FXN 3 forward 9:69043608-69043633; SpCas9
gaattttgctcatcacccaggc

SEQ ID NO: 40137 - DNA, 21 bp, Artificial Sequence
  Synthetic: FXN 3 forward 9:69043609-69043633; SpCas9
aattttgctcatcacccaggc

SEQ ID NO: 40138 - DNA, 20 bp, Artificial Sequence
  Synthetic: FXN 3 forward 9:69043610-69043633; SpCas9
attttgctcatcacccaggc

SEQ ID NO: 40139 - DNA, 19 bp, Artificial Sequence
  Synthetic: FXN 3 forward 9:69043611-69043633; SpCas9
ttttgctcatcacccaggc

SEQ ID NO: 40140 - DNA, 18 bp, Artificial Sequence
  Synthetic: FXN 3 forward 9:69043612-69043633; SpCas9
tttgctcatcacccaggc

SEQ ID NO: 40141 - DNA, 25 bp, Artificial Sequence
  Synthetic: FXN 3 forward 9:69043607-69043635; SpCas9
ggaattttgctcatcacccaggctg

SEQ ID NO: 40142 - DNA, 24 bp, Artificial Sequence
  Synthetic: FXN 3 forward 9:69043608-69043635; SpCas9
gaattttgctcatcacccaggctg

SEQ ID NO: 40143 - DNA, 23 bp, Artificial Sequence
  Synthetic: FXN 3 forward 9:69043609-69043635; SpCas9
aattttgctcatcacccaggctg

SEQ ID NO: 40144 - DNA, 22 bp, Artificial Sequence
  Synthetic: FXN 3 forward 9:69043610-69043635; SpCas9
attttgctcatcacccaggctg

SEQ ID NO: 40145 - DNA, 21 bp, Artificial Sequence
  Synthetic: FXN 3 forward 9:69043611-69043635; SpCas9
ttttgctcatcacccaggctg

SEQ ID NO: 40146 - DNA, 20 bp, Artificial Sequence
  Synthetic: FXN 3 forward 9:69043612-69043635; SpCas9
tttgctcatcacccaggctg

SEQ ID NO: 40147 - DNA, 19 bp, Artificial Sequence
  Synthetic: FXN 3 forward 9:69043613-69043635; SpCas9
ttgctcatcacccaggctg

SEQ ID NO: 40148 - DNA, 18 bp, Artificial Sequence
  Synthetic: FXN 3 forward 9:69043614-69043635; SpCas9
tgctcatcacccaggctg

SEQ ID NO: 40149 - DNA, 25 bp, Artificial Sequence
  Synthetic: FXN 3 forward 9:69043615-69043643; SpCas9
gctcatcacccaggctggagtgcaa

SEQ ID NO: 40150 - DNA, 24 bp, Artificial Sequence
  Synthetic: FXN 3 forward 9:69043616-69043643; SpCas9
ctcatcacccaggctggagtgcaa

SEQ ID NO: 40151 - DNA, 23 bp, Artificial Sequence
  Synthetic: FXN 3 forward 9:69043617-69043643; SpCas9
tcatcacccaggctggagtgcaa

SEQ ID NO: 40152 - DNA, 22 bp, Artificial Sequence
  Synthetic: FXN 3 forward 9:69043618-69043643; SpCas9
catcacccaggctggagtgcaa

SEQ ID NO: 40153 - DNA, 21 bp, Artificial Sequence
  Synthetic: FXN 3 forward 9:69043619-69043643; SpCas9
atcacccaggctggagtgcaa

SEQ ID NO: 40154 - DNA, 20 bp, Artificial Sequence
  Synthetic: FXN 3 forward 9:69043620-69043643; SpCas9
tcacccaggctggagtgcaa

SEQ ID NO: 40155 - DNA, 19 bp, Artificial Sequence
  Synthetic: FXN 3 forward 9:69043621-69043643; SpCas9
cacccaggctggagtgcaa

SEQ ID NO: 40156 - DNA, 18 bp, Artificial Sequence
  Synthetic: FXN 3 forward 9:69043622-69043643; SpCas9
acccaggctggagtgcaa

SEQ ID NO: 40157 - DNA, 25 bp, Artificial Sequence
  Synthetic: FXN 3 reverse 9:69043616-69043644; SpCas9
accattgcactccagcctgggtgat

SEQ ID NO: 40158 - DNA, 24 bp, Artificial Sequence
  Synthetic: FXN 3 reverse 9:69043617-69043644; SpCas9
ccattgcactccagcctgggtgat

SEQ ID NO: 40159 - DNA, 23 bp, Artificial Sequence
  Synthetic: FXN 3 reverse 9:69043618-69043644; SpCas9
cattgcactccagcctgggtgat

SEQ ID NO: 40160 - DNA, 22 bp, Artificial Sequence
  Synthetic: FXN 3 reverse 9:69043619-69043644; SpCas9
attgcactccagcctgggtgat

SEQ ID NO: 40161 - DNA, 21 bp, Artificial Sequence
  Synthetic: FXN 3 reverse 9:69043620-69043644; SpCas9
ttgcactccagcctgggtgat

SEQ ID NO: 40162 - DNA, 20 bp, Artificial Sequence
  Synthetic: FXN 3 reverse 9:69043621-69043644; SpCas9
tgcactccagcctgggtgat

SEQ ID NO: 40163 - DNA, 19 bp, Artificial Sequence
  Synthetic: FXN 3 reverse 9:69043622-69043644; SpCas9
gcactccagcctgggtgat

SEQ ID NO: 40164 - DNA, 18 bp, Artificial Sequence
  Synthetic: FXN 3 reverse 9:69043623-69043644; SpCas9
cactccagcctgggtgat

SEQ ID NO: 40165 - DNA, 25 bp, Artificial Sequence
  Synthetic: FXN 3 reverse 9:69043623-69043651; SpCas9
ggatcgcaccattgcactccagcct

SEQ ID NO: 40166 - DNA, 24 bp, Artificial Sequence
  Synthetic: FXN 3 reverse 9:69043624-69043651; SpCas9
gatcgcaccattgcactccagcct

SEQ ID NO: 40167 - DNA, 23 bp, Artificial Sequence
  Synthetic: FXN 3 reverse 9:69043625-69043651; SpCas9
atcgcaccattgcactccagcct

SEQ ID NO: 40168 - DNA, 22 bp, Artificial Sequence
  Synthetic: FXN 3 reverse 9:69043626-69043651; SpCas9
tcgcaccattgcactccagcct

SEQ ID NO: 40169 - DNA, 21 bp, Artificial Sequence
  Synthetic: FXN 3 reverse 9:69043627-69043651; SpCas9
cgcaccattgcactccagcct

SEQ ID NO: 40170 - DNA, 20 bp, Artificial Sequence
  Synthetic: FXN 3 reverse 9:69043628-69043651; SpCas9
gcaccattgcactccagcct

SEQ ID NO: 40171 - DNA, 19 bp, Artificial Sequence
  Synthetic: FXN 3 reverse 9:69043629-69043651; SpCas9
caccattgcactccagcct

SEQ ID NO: 40172 - DNA, 18 bp, Artificial Sequence
  Synthetic: FXN 3 reverse 9:69043630-69043651; SpCas9
accattgcactccagcct

SEQ ID NO: 40173 - DNA, 25 bp, Artificial Sequence
  Synthetic: FXN 3 reverse 9:69043624-69043652; SpCas9
aggatcgcaccattgcactccagcc

SEQ ID NO: 40174 - DNA, 24 bp, Artificial Sequence
  Synthetic: FXN 3 reverse 9:69043625-69043652; SpCas9
ggatcgcaccattgcactccagcc

SEQ ID NO: 40175 - DNA, 23 bp, Artificial Sequence
  Synthetic: FXN 3 reverse 9:69043626-69043652; SpCas9
gatcgcaccattgcactccagcc

SEQ ID NO: 40176 - DNA, 22 bp, Artificial Sequence
  Synthetic: FXN 3 reverse 9:69043627-69043652; SpCas9
atcgcaccattgcactccagcc

SEQ ID NO: 40177 - DNA, 21 bp, Artificial Sequence
  Synthetic: FXN 3 reverse 9:69043628-69043652; SpCas9
tcgcaccattgcactccagcc

SEQ ID NO: 40178 - DNA, 20 bp, Artificial Sequence
  Synthetic: FXN 3 reverse 9:69043629-69043652; SpCas9
cgcaccattgcactccagcc

SEQ ID NO: 40179 - DNA, 19 bp, Artificial Sequence
  Synthetic: FXN 3 reverse 9:69043630-69043652; SpCas9
gcaccattgcactccagcc

SEQ ID NO: 40180 - DNA, 18 bp, Artificial Sequence
  Synthetic: FXN 3 reverse 9:69043631-69043652; SpCas9
caccattgcactccagcc

SEQ ID NO: 40181 - DNA, 25 bp, Artificial Sequence
  Synthetic: FXN 3 forward 9:69043626-69043654; SpCas9
aggctggagtgcaatggtgcgatcc

SEQ ID NO: 40182 - DNA, 24 bp, Artificial Sequence
  Synthetic: FXN 3 forward 9:69043627-69043654; SpCas9
ggctggagtgcaatggtgcgatcc

SEQ ID NO: 40183 - DNA, 23 bp, Artificial Sequence
  Synthetic: FXN 3 forward 9:69043628-69043654; SpCas9
gctggagtgcaatggtgcgatcc

SEQ ID NO: 40184 - DNA, 22 bp, Artificial Sequence
  Synthetic: FXN 3 forward 9:69043629-69043654; SpCas9
ctggagtgcaatggtgcgatcc

SEQ ID NO: 40185 - DNA, 21 bp, Artificial Sequence
  Synthetic: FXN 3 forward 9:69043630-69043654; SpCas9
tggagtgcaatggtgcgatcc

SEQ ID NO: 40186 - DNA, 20 bp, Artificial Sequence
  Synthetic: FXN 3 forward 9:69043631-69043654; SpCas9
ggagtgcaatggtgcgatcc

SEQ ID NO: 40187 - DNA, 19 bp, Artificial Sequence
  Synthetic: FXN 3 forward 9:69043632-69043654; SpCas9
gagtgcaatggtgcgatcc

SEQ ID NO: 40188 - DNA, 18 bp, Artificial Sequence
  Synthetic: FXN 3 forward 9:69043633-69043654; SpCas9
agtgcaatggtgcgatcc

SEQ ID NO: 40189 - DNA, 25 bp, Artificial Sequence
  Synthetic: FXN 3 reverse 9:69043629-69043657; SpCas9
gagccaggatcgcaccattgcactc

SEQ ID NO: 40190 - DNA, 24 bp, Artificial Sequence
  Synthetic: FXN 3 reverse 9:69043630-69043657; SpCas9
agccaggatcgcaccattgcactc

SEQ ID NO: 40191 - DNA, 23 bp, Artificial Sequence
  Synthetic: FXN 3 reverse 9:69043631-69043657; SpCas9
gccaggatcgcaccattgcactc

SEQ ID NO: 40192 - DNA, 22 bp, Artificial Sequence
  Synthetic: FXN 3 reverse 9:69043632-69043657; SpCas9
ccaggatcgcaccattgcactc

SEQ ID NO: 40193 - DNA, 21 bp, Artificial Sequence
  Synthetic: FXN 3 reverse 9:69043633-69043657; SpCas9
caggatcgcaccattgcactc

SEQ ID NO: 40194 - DNA, 20 bp, Artificial Sequence
  Synthetic: FXN 3 reverse 9:69043634-69043657; SpCas9
aggatcgcaccattgcactc

SEQ ID NO: 40195 - DNA, 19 bp, Artificial Sequence
  Synthetic: FXN 3 reverse 9:69043635-69043657; SpCas9
ggatcgcaccattgcactc

SEQ ID NO: 40196 - DNA, 18 bp, Artificial Sequence
  Synthetic: FXN 3 reverse 9:69043636-69043657; SpCas9
gatcgcaccattgcactc

SEQ ID NO: 40197 - DNA, 25 bp, Artificial Sequence
  Synthetic: FXN 3 reverse 9:69043649-69043677; SpCas9
cgggaggtggaggttgcagtgagcc

SEQ ID NO: 40198 - DNA, 24 bp, Artificial Sequence
  Synthetic: FXN 3 reverse 9:69043650-69043677; SpCas9
gggaggtggaggttgcagtgagcc

SEQ ID NO: 40199 - DNA, 23 bp, Artificial Sequence
  Synthetic: FXN 3 reverse 9:69043651-69043677; SpCas9
ggaggtggaggttgcagtgagcc

SEQ ID NO: 40200 - DNA, 22 bp, Artificial Sequence
  Synthetic: FXN 3 reverse 9:69043652-69043677; SpCas9
gaggtggaggttgcagtgagcc

SEQ ID NO: 40201 - DNA, 21 bp, Artificial Sequence
  Synthetic: FXN 3 reverse 9:69043653-69043677; SpCas9
aggtggaggttgcagtgagcc

SEQ ID NO: 40202 - DNA, 20 bp, Artificial Sequence
  Synthetic: FXN 3 reverse 9:69043654-69043677; SpCas9
ggtggaggttgcagtgagcc

SEQ ID NO: 40203 - DNA, 19 bp, Artificial Sequence
  Synthetic: FXN 3 reverse 9:69043655-69043677; SpCas9
gtggaggttgcagtgagcc

SEQ ID NO: 40204 - DNA, 18 bp, Artificial Sequence
  Synthetic: FXN 3 reverse 9:69043656-69043677; SpCas9
tggaggttgcagtgagcc

SEQ ID NO: 40205 - DNA, 25 bp, Artificial Sequence
  Synthetic: FXN 3 forward 9:69043650-69043678; SpCas9
ctggctcactgcaacctccacctcc

SEQ ID NO: 40206 - DNA, 24 bp, Artificial Sequence
  Synthetic: FXN 3 forward 9:69043651-69043678; SpCas9
tggctcactgcaacctccacctcc

SEQ ID NO: 40207 - DNA, 23 bp, Artificial Sequence
  Synthetic: FXN 3 forward 9:69043652-69043678; SpCas9
ggctcactgcaacctccacctcc

SEQ ID NO: 40208 - DNA, 22 bp, Artificial Sequence
  Synthetic: FXN 3 forward 9:69043653-69043678; SpCas9
gctcactgcaacctccacctcc

SEQ ID NO: 40209 - DNA, 21 bp, Artificial Sequence
  Synthetic: FXN 3 forward 9:69043654-69043678; SpCas9
ctcactgcaacctccacctcc

SEQ ID NO: 40210 - DNA, 20 bp, Artificial Sequence
  Synthetic: FXN 3 forward 9:69043655-69043678; SpCas9
tcactgcaacctccacctcc

SEQ ID NO: 40211 - DNA, 19 bp, Artificial Sequence
  Synthetic: FXN 3 forward 9:69043656-69043678; SpCas9
cactgcaacctccacctcc

SEQ ID NO: 40212 - DNA, 18 bp, Artificial Sequence
  Synthetic: FXN 3 forward 9:69043657-69043678; SpCas9
actgcaacctccacctcc

SEQ ID NO: 40213 - DNA, 25 bp, Artificial Sequence
  Synthetic: FXN 3 reverse 9:69043650-69043678; SpCas9
ccgggaggtggaggttgcagtgagc

SEQ ID NO: 40214 - DNA, 24 bp, Artificial Sequence
  Synthetic: FXN 3 reverse 9:69043651-69043678; SpCas9
cgggaggtggaggttgcagtgagc

SEQ ID NO: 40215 - DNA, 23 bp, Artificial Sequence
  Synthetic: FXN 3 reverse 9:69043652-69043678; SpCas9
gggaggtggaggttgcagtgagc

SEQ ID NO: 40216 - DNA, 22 bp, Artificial Sequence
  Synthetic: FXN 3 reverse 9:69043653-69043678; SpCas9
ggaggtggaggttgcagtgagc

SEQ ID NO: 40217 - DNA, 21 bp, Artificial Sequence
  Synthetic: FXN 3 reverse 9:69043654-69043678; SpCas9
gaggtggaggttgcagtgagc

SEQ ID NO: 40218 - DNA, 20 bp, Artificial Sequence
  Synthetic: FXN 3 reverse 9:69043655-69043678; SpCas9
aggtggaggttgcagtgagc

SEQ ID NO: 40219 - DNA, 19 bp, Artificial Sequence
  Synthetic: FXN 3 reverse 9:69043656-69043678; SpCas9
ggtggaggttgcagtgagc

SEQ ID NO: 40220 - DNA, 18 bp, Artificial Sequence
  Synthetic: FXN 3 reverse 9:69043657-69043678; SpCas9
gtggaggttgcagtgagc

SEQ ID NO: 40221 - DNA, 25 bp, Artificial Sequence
  Synthetic: FXN 3 reverse 9:69043654-69043682; SpCas9
gaatccgggaggtggaggttgcagt

SEQ ID NO: 40222 - DNA, 24 bp, Artificial Sequence
  Synthetic: FXN 3 reverse 9:69043655-69043682; SpCas9
aatccgggaggtggaggttgcagt

SEQ ID NO: 40223 - DNA, 23 bp, Artificial Sequence
  Synthetic: FXN 3 reverse 9:69043656-69043682; SpCas9
atccgggaggtggaggttgcagt

SEQ ID NO: 40224 - DNA, 22 bp, Artificial Sequence
  Synthetic: FXN 3 reverse 9:69043657-69043682; SpCas9
tccgggaggtggaggttgcagt

SEQ ID NO: 40225 - DNA, 21 bp, Artificial Sequence
  Synthetic: FXN 3 reverse 9:69043658-69043682; SpCas9
ccgggaggtggaggttgcagt

SEQ ID NO: 40226 - DNA, 20 bp, Artificial Sequence
  Synthetic: FXN 3 reverse 9:69043659-69043682; SpCas9
cgggaggtggaggttgcagt

SEQ ID NO: 40227 - DNA, 19 bp, Artificial Sequence
  Synthetic: FXN 3 reverse 9:69043660-69043682; SpCas9
gggaggtggaggttgcagt

SEQ ID NO: 40228 - DNA, 18 bp, Artificial Sequence
  Synthetic: FXN 3 reverse 9:69043661-69043682; SpCas9
ggaggtggaggttgcagt

SEQ ID NO: 40229 - DNA, 25 bp, Artificial Sequence
  Synthetic: FXN 3 forward 9:69043657-69043685; SpCas9
actgcaacctccacctcccggattc

SEQ ID NO: 40230 - DNA, 24 bp, Artificial Sequence
  Synthetic: FXN 3 forward 9:69043658-69043685; SpCas9
ctgcaacctccacctcccggattc

SEQ ID NO: 40231 - DNA, 23 bp, Artificial Sequence
  Synthetic: FXN 3 forward 9:69043659-69043685; SpCas9
tgcaacctccacctcccggattc

SEQ ID NO: 40232 - DNA, 22 bp, Artificial Sequence
  Synthetic: FXN 3 forward 9:69043660-69043685; SpCas9
gcaacctccacctcccggattc

SEQ ID NO: 40233 - DNA, 21 bp, Artificial Sequence
  Synthetic: FXN 3 forward 9:69043661-69043685; SpCas9
caacctccacctcccggattc

SEQ ID NO: 40234 - DNA, 20 bp, Artificial Sequence
  Synthetic: FXN 3 forward 9:69043662-69043685; SpCas9
aacctccacctcccggattc

SEQ ID NO: 40235 - DNA, 19 bp, Artificial Sequence
  Synthetic: FXN 3 forward 9:69043663-69043685; SpCas9
acctccacctcccggattc

SEQ ID NO: 40236 - DNA, 18 bp, Artificial Sequence
  Synthetic: FXN 3 forward 9:69043664-69043685; SpCas9
cctccacctcccggattc

SEQ ID NO: 40237 - DNA, 25 bp, Artificial Sequence
  Synthetic: FXN 3 reverse 9:69043658-69043686; SpCas9
gcttgaatccgggaggtggaggttg

SEQ ID NO: 40238 - DNA, 24 bp, Artificial Sequence
  Synthetic: FXN 3 reverse 9:69043659-69043686; SpCas9
cttgaatccgggaggtggaggttg

SEQ ID NO: 40239 - DNA, 23 bp, Artificial Sequence
  Synthetic: FXN 3 reverse 9:69043660-69043686; SpCas9
ttgaatccgggaggtggaggttg

SEQ ID NO: 40240 - DNA, 22 bp, Artificial Sequence
  Synthetic: FXN 3 reverse 9:69043661-69043686; SpCas9
tgaatccgggaggtggaggttg

SEQ ID NO: 40241 - DNA, 21 bp, Artificial Sequence
  Synthetic: FXN 3 reverse 9:69043662-69043686; SpCas9
gaatccgggaggtggaggttg

SEQ ID NO: 40242 - DNA, 20 bp, Artificial Sequence
  Synthetic: FXN 3 reverse 9:69043663-69043686; SpCas9
aatccgggaggtggaggttg

SEQ ID NO: 40243 - DNA, 19 bp, Artificial Sequence
  Synthetic: FXN 3 reverse 9:69043664-69043686; SpCas9
atccgggaggtggaggttg

SEQ ID NO: 40244 - DNA, 18 bp, Artificial Sequence
  Synthetic: FXN 3 reverse 9:69043665-69043686; SpCas9
tccgggaggtggaggttg

SEQ ID NO: 40245 - DNA, 25 bp, Artificial Sequence
  Synthetic: FXN 3 reverse 9:69043664-69043692; SpCas9
agaattgcttgaatccgggaggtgg

SEQ ID NO: 40246 - DNA, 24 bp, Artificial Sequence
  Synthetic: FXN 3 reverse 9:69043665-69043692; SpCas9
gaattgcttgaatccgggaggtgg

SEQ ID NO: 40247 - DNA, 23 bp, Artificial Sequence
  Synthetic: FXN 3 reverse 9:69043666-69043692; SpCas9
aattgcttgaatccgggaggtgg

SEQ ID NO: 40248 - DNA, 22 bp, Artificial Sequence
  Synthetic: FXN 3 reverse 9:69043667-69043692; SpCas9
attgcttgaatccgggaggtgg

SEQ ID NO: 40249 - DNA, 21 bp, Artificial Sequence
  Synthetic: FXN 3 reverse 9:69043668-69043692; SpCas9
ttgcttgaatccgggaggtgg

SEQ ID NO: 40250 - DNA, 20 bp, Artificial Sequence
  Synthetic: FXN 3 reverse 9:69043669-69043692; SpCas9
tgcttgaatccgggaggtgg

SEQ ID NO: 40251 - DNA, 19 bp, Artificial Sequence
  Synthetic: FXN 3 reverse 9:69043670-69043692; SpCas9
gcttgaatccgggaggtgg

SEQ ID NO: 40252 - DNA, 18 bp, Artificial Sequence
  Synthetic: FXN 3 reverse 9:69043671-69043692; SpCas9
cttgaatccgggaggtgg

SEQ ID NO: 40253 - DNA, 25 bp, Artificial Sequence
  Synthetic: FXN 3 reverse 9:69043665-69043693; SpCas9
aagaattgcttgaatccgggaggtg

SEQ ID NO: 40254 - DNA, 24 bp, Artificial Sequence
  Synthetic: FXN 3 reverse 9:69043666-69043693; SpCas9
agaattgcttgaatccgggaggtg

SEQ ID NO: 40255 - DNA, 23 bp, Artificial Sequence
  Synthetic: FXN 3 reverse 9:69043667-69043693; SpCas9
gaattgcttgaatccgggaggtg

SEQ ID NO: 40256 - DNA, 22 bp, Artificial Sequence
  Synthetic: FXN 3 reverse 9:69043668-69043693; SpCas9
aattgcttgaatccgggaggtg

SEQ ID NO: 40257 - DNA, 21 bp, Artificial Sequence
  Synthetic: FXN 3 reverse 9:69043669-69043693; SpCas9
attgcttgaatccgggaggtg

SEQ ID NO: 40258 - DNA, 20 bp, Artificial Sequence
  Synthetic: FXN 3 reverse 9:69043670-69043693; SpCas9
ttgcttgaatccgggaggtg

SEQ ID NO: 40259 - DNA, 19 bp, Artificial Sequence
  Synthetic: FXN 3 reverse 9:69043671-69043693; SpCas9
tgcttgaatccgggaggtg

SEQ ID NO: 40260 - DNA, 18 bp, Artificial Sequence
  Synthetic: FXN 3 reverse 9:69043672-69043693; SpCas9
gcttgaatccgggaggtg

SEQ ID NO: 40261 - DNA, 25 bp, Artificial Sequence
  Synthetic: FXN 3 reverse 9:69043667-69043695; SpCas9
agaagaattgcttgaatccgggagg

SEQ ID NO: 40262 - DNA, 24 bp, Artificial Sequence
  Synthetic: FXN 3 reverse 9:69043668-69043695; SpCas9
gaagaattgcttgaatccgggagg

SEQ ID NO: 40263 - DNA, 23 bp, Artificial Sequence
  Synthetic: FXN 3 reverse 9:69043669-69043695; SpCas9
aagaattgcttgaatccgggagg

SEQ ID NO: 40264 - DNA, 22 bp, Artificial Sequence
  Synthetic: FXN 3 reverse 9:69043670-69043695; SpCas9
agaattgcttgaatccgggagg

SEQ ID NO: 40265 - DNA, 21 bp, Artificial Sequence
  Synthetic: FXN 3 reverse 9:69043671-69043695; SpCas9
gaattgcttgaatccgggagg

SEQ ID NO: 40266 - DNA, 20 bp, Artificial Sequence
  Synthetic: FXN 3 reverse 9:69043672-69043695; SpCas9
aattgcttgaatccgggagg

SEQ ID NO: 40267 - DNA, 19 bp, Artificial Sequence
  Synthetic: FXN 3 reverse 9:69043673-69043695; SpCas9
attgcttgaatccgggagg

SEQ ID NO: 40268 - DNA, 18 bp, Artificial Sequence
  Synthetic: FXN 3 reverse 9:69043674-69043695; SpCas9
ttgcttgaatccgggagg

SEQ ID NO: 40269 - DNA, 25 bp, Artificial Sequence
  Synthetic: FXN 3 reverse 9:69043670-69043698; SpCas9
ggcagaagaattgcttgaatccggg

SEQ ID NO: 40270 - DNA, 24 bp, Artificial Sequence
  Synthetic: FXN 3 reverse 9:69043671-69043698; SpCas9
gcagaagaattgcttgaatccggg

SEQ ID NO: 40271 - DNA, 23 bp, Artificial Sequence
  Synthetic: FXN 3 reverse 9:69043672-69043698; SpCas9
cagaagaattgcttgaatccggg

SEQ ID NO: 40272 - DNA, 22 bp, Artificial Sequence
  Synthetic: FXN 3 reverse 9:69043673-69043698; SpCas9
agaagaattgcttgaatccggg

SEQ ID NO: 40273 - DNA, 21 bp, Artificial Sequence
  Synthetic: FXN 3 reverse 9:69043674-69043698; SpCas9
gaagaattgcttgaatccggg

SEQ ID NO: 40274 - DNA, 20 bp, Artificial Sequence
  Synthetic: FXN 3 reverse 9:69043675-69043698; SpCas9
aagaattgcttgaatccggg

SEQ ID NO: 40275 - DNA, 19 bp, Artificial Sequence
  Synthetic: FXN 3 reverse 9:69043676-69043698; SpCas9
agaattgcttgaatccggg

SEQ ID NO: 40276 - DNA, 18 bp, Artificial Sequence
  Synthetic: FXN 3 reverse 9:69043677-69043698; SpCas9
gaattgcttgaatccggg

SEQ ID NO: 40277 - DNA, 25 bp, Artificial Sequence
  Synthetic: FXN 3 reverse 9:69043671-69043699; SpCas9
aggcagaagaattgcttgaatccgg

SEQ ID NO: 40278 - DNA, 24 bp, Artificial Sequence
  Synthetic: FXN 3 reverse 9:69043672-69043699; SpCas9
ggcagaagaattgcttgaatccgg

SEQ ID NO: 40279 - DNA, 23 bp, Artificial Sequence
  Synthetic: FXN 3 reverse 9:69043673-69043699; SpCas9
gcagaagaattgcttgaatccgg

SEQ ID NO: 40280 - DNA, 22 bp, Artificial Sequence
  Synthetic: FXN 3 reverse 9:69043674-69043699; SpCas9
cagaagaattgcttgaatccgg

SEQ ID NO: 40281 - DNA, 21 bp, Artificial Sequence
  Synthetic: FXN 3 reverse 9:69043675-69043699; SpCas9
agaagaattgcttgaatccgg

SEQ ID NO: 40282 - DNA, 20 bp, Artificial Sequence
  Synthetic: FXN 3 reverse 9:69043676-69043699; SpCas9
gaagaattgcttgaatccgg

SEQ ID NO: 40283 - DNA, 19 bp, Artificial Sequence
  Synthetic: FXN 3 reverse 9:69043677-69043699; SpCas9
aagaattgcttgaatccgg

SEQ ID NO: 40284 - DNA, 18 bp, Artificial Sequence
  Synthetic: FXN 3 reverse 9:69043678-69043699; SpCas9
agaattgcttgaatccgg

SEQ ID NO: 40285 - DNA, 25 bp, Artificial Sequence
  Synthetic: FXN 3 reverse 9:69043673-69043701; SpCas9
tgaggcagaagaattgcttgaatcc

SEQ ID NO: 40286 - DNA, 24 bp, Artificial Sequence
  Synthetic: FXN 3 reverse 9:69043674-69043701; SpCas9
gaggcagaagaattgcttgaatcc

SEQ ID NO: 40287 - DNA, 23 bp, Artificial Sequence
  Synthetic: FXN 3 reverse 9:69043675-69043701; SpCas9
aggcagaagaattgcttgaatcc

SEQ ID NO: 40288 - DNA, 22 bp, Artificial Sequence
  Synthetic: FXN 3 reverse 9:69043676-69043701; SpCas9
ggcagaagaattgcttgaatcc

SEQ ID NO: 40289 - DNA, 21 bp, Artificial Sequence
  Synthetic: FXN 3 reverse 9:69043677-69043701; SpCas9
gcagaagaattgcttgaatcc

SEQ ID NO: 40290 - DNA, 20 bp, Artificial Sequence
  Synthetic: FXN 3 reverse 9:69043678-69043701; SpCas9
cagaagaattgcttgaatcc

SEQ ID NO: 40291 - DNA, 19 bp, Artificial Sequence
  Synthetic: FXN 3 reverse 9:69043679-69043701; SpCas9
agaagaattgcttgaatcc

SEQ ID NO: 40292 - DNA, 18 bp, Artificial Sequence
  Synthetic: FXN 3 reverse 9:69043680-69043701; SpCas9
gaagaattgcttgaatcc

SEQ ID NO: 40293 - DNA, 25 bp, Artificial Sequence
  Synthetic: FXN 3 forward 9:69043674-69043702; SpCas9
ccggattcaagcaattcttctgcct

SEQ ID NO: 40294 - DNA, 24 bp, Artificial Sequence
  Synthetic: FXN 3 forward 9:69043675-69043702; SpCas9
cggattcaagcaattcttctgcct

SEQ ID NO: 40295 - DNA, 23 bp, Artificial Sequence
  Synthetic: FXN 3 forward 9:69043676-69043702; SpCas9
ggattcaagcaattcttctgcct

SEQ ID NO: 40296 - DNA, 22 bp, Artificial Sequence
  Synthetic: FXN 3 forward 9:69043677-69043702; SpCas9
gattcaagcaattcttctgcct

SEQ ID NO: 40297 - DNA, 21 bp, Artificial Sequence
  Synthetic: FXN 3 forward 9:69043678-69043702; SpCas9
attcaagcaattcttctgcct

SEQ ID NO: 40298 - DNA, 20 bp, Artificial Sequence
  Synthetic: FXN 3 forward 9:69043679-69043702; SpCas9
ttcaagcaattcttctgcct

SEQ ID NO: 40299 - DNA, 19 bp, Artificial Sequence
  Synthetic: FXN 3 forward 9:69043680-69043702; SpCas9
tcaagcaattcttctgcct

SEQ ID NO: 40300 - DNA, 18 bp, Artificial Sequence
  Synthetic: FXN 3 forward 9:69043681-69043702; SpCas9
caagcaattcttctgcct

SEQ ID NO: 40301 - DNA, 25 bp, Artificial Sequence
  Synthetic: FXN 3 reverse 9:69043674-69043702; SpCas9
ctgaggcagaagaattgcttgaatc

SEQ ID NO: 40302 - DNA, 24 bp, Artificial Sequence
  Synthetic: FXN 3 reverse 9:69043675-69043702; SpCas9
tgaggcagaagaattgcttgaatc

SEQ ID NO: 40303 - DNA, 23 bp, Artificial Sequence
  Synthetic: FXN 3 reverse 9:69043676-69043702; SpCas9
gaggcagaagaattgcttgaatc

SEQ ID NO: 40304 - DNA, 22 bp, Artificial Sequence
  Synthetic: FXN 3 reverse 9:69043677-69043702; SpCas9
aggcagaagaattgcttgaatc

SEQ ID NO: 40305 - DNA, 21 bp, Artificial Sequence
  Synthetic: FXN 3 reverse 9:69043678-69043702; SpCas9
ggcagaagaattgcttgaatc

SEQ ID NO: 40306 - DNA, 20 bp, Artificial Sequence
  Synthetic: FXN 3 reverse 9:69043679-69043702; SpCas9
gcagaagaattgcttgaatc

SEQ ID NO: 40307 - DNA, 19 bp, Artificial Sequence
  Synthetic: FXN 3 reverse 9:69043680-69043702; SpCas9
cagaagaattgcttgaatc

SEQ ID NO: 40308 - DNA, 18 bp, Artificial Sequence
  Synthetic: FXN 3 reverse 9:69043681-69043702; SpCas9
agaagaattgcttgaatc

SEQ ID NO: 40309 - DNA, 25 bp, Artificial Sequence
  Synthetic: FXN 3 forward 9:69043683-69043711; SpCas9
agcaattcttctgcctcagcctcct

SEQ ID NO: 40310 - DNA, 24 bp, Artificial Sequence
  Synthetic: FXN 3 forward 9:69043684-69043711; SpCas9
gcaattcttctgcctcagcctcct

SEQ ID NO: 40311 - DNA, 23 bp, Artificial Sequence
  Synthetic: FXN 3 forward 9:69043685-69043711; SpCas9
caattcttctgcctcagcctcct

SEQ ID NO: 40312 - DNA, 22 bp, Artificial Sequence
  Synthetic: FXN 3 forward 9:69043686-69043711; SpCas9
aattcttctgcctcagcctcct

SEQ ID NO: 40313 - DNA, 21 bp, Artificial Sequence
  Synthetic: FXN 3 forward 9:69043687-69043711; SpCas9
attcttctgcctcagcctcct

SEQ ID NO: 40314 - DNA, 20 bp, Artificial Sequence
  Synthetic: FXN 3 forward 9:69043688-69043711; SpCas9
ttcttctgcctcagcctcct

SEQ ID NO: 40315 - DNA, 19 bp, Artificial Sequence
  Synthetic: FXN 3 forward 9:69043689-69043711; SpCas9
tcttctgcctcagcctcct

SEQ ID NO: 40316 - DNA, 18 bp, Artificial Sequence
  Synthetic: FXN 3 forward 9:69043690-69043711; SpCas9
cttctgcctcagcctcct

SEQ ID NO: 40317 - DNA, 25 bp, Artificial Sequence
  Synthetic: FXN 3 forward 9:69043686-69043714; SpCas9
aattcttctgcctcagcctcctgag

SEQ ID NO: 40318 - DNA, 24 bp, Artificial Sequence
  Synthetic: FXN 3 forward 9:69043687-69043714; SpCas9
attcttctgcctcagcctcctgag

SEQ ID NO: 40319 - DNA, 23 bp, Artificial Sequence
  Synthetic: FXN 3 forward 9:69043688-69043714; SpCas9
ttcttctgcctcagcctcctgag

SEQ ID NO: 40320 - DNA, 22 bp, Artificial Sequence
  Synthetic: FXN 3 forward 9:69043689-69043714; SpCas9
tcttctgcctcagcctcctgag

SEQ ID NO: 40321 - DNA, 21 bp, Artificial Sequence
  Synthetic: FXN 3 forward 9:69043690-69043714; SpCas9
cttctgcctcagcctcctgag

SEQ ID NO: 40322 - DNA, 20 bp, Artificial Sequence
  Synthetic: FXN 3 forward 9:69043691-69043714; SpCas9
ttctgcctcagcctcctgag

SEQ ID NO: 40323 - DNA, 19 bp, Artificial Sequence
  Synthetic: FXN 3 forward 9:69043692-69043714; SpCas9
tctgcctcagcctcctgag

SEQ ID NO: 40324 - DNA, 18 bp, Artificial Sequence
  Synthetic: FXN 3 forward 9:69043693-69043714; SpCas9
ctgcctcagcctcctgag

SEQ ID NO: 40325 - DNA, 25 bp, Artificial Sequence
  Synthetic: FXN 3 reverse 9:69043690-69043718; SpCas9
tgtgctactcaggaggctgaggcag

SEQ ID NO: 40326 - DNA, 24 bp, Artificial Sequence
  Synthetic: FXN 3 reverse 9:69043691-69043718; SpCas9
gtgctactcaggaggctgaggcag

SEQ ID NO: 40327 - DNA, 23 bp, Artificial Sequence
  Synthetic: FXN 3 reverse 9:69043692-69043718; SpCas9
tgctactcaggaggctgaggcag

SEQ ID NO: 40328 - DNA, 22 bp, Artificial Sequence
  Synthetic: FXN 3 reverse 9:69043693-69043718; SpCas9
gctactcaggaggctgaggcag

SEQ ID NO: 40329 - DNA, 21 bp, Artificial Sequence
  Synthetic: FXN 3 reverse 9:69043694-69043718; SpCas9
ctactcaggaggctgaggcag

SEQ ID NO: 40330 - DNA, 20 bp, Artificial Sequence
  Synthetic: FXN 3 reverse 9:69043695-69043718; SpCas9
tactcaggaggctgaggcag

SEQ ID NO: 40331 - DNA, 19 bp, Artificial Sequence
  Synthetic: FXN 3 reverse 9:69043696-69043718; SpCas9
actcaggaggctgaggcag

SEQ ID NO: 40332 - DNA, 18 bp, Artificial Sequence
  Synthetic: FXN 3 reverse 9:69043697-69043718; SpCas9
ctcaggaggctgaggcag

SEQ ID NO: 40333 - DNA, 25 bp, Artificial Sequence
  Synthetic: FXN 3 forward 9:69043691-69043719; SpCas9
ttctgcctcagcctcctgagtagca

SEQ ID NO: 40334 - DNA, 24 bp, Artificial Sequence
  Synthetic: FXN 3 forward 9:69043692-69043719; SpCas9
tctgcctcagcctcctgagtagca

SEQ ID NO: 40335 - DNA, 23 bp, Artificial Sequence
  Synthetic: FXN 3 forward 9:69043693-69043719; SpCas9
ctgcctcagcctcctgagtagca

SEQ ID NO: 40336 - DNA, 22 bp, Artificial Sequence
  Synthetic: FXN 3 forward 9:69043694-69043719; SpCas9
tgcctcagcctcctgagtagca

SEQ ID NO: 40337 - DNA, 21 bp, Artificial Sequence
  Synthetic: FXN 3 forward 9:69043695-69043719; SpCas9
gcctcagcctcctgagtagca

SEQ ID NO: 40338 - DNA, 20 bp, Artificial Sequence
  Synthetic: FXN 3 forward 9:69043696-69043719; SpCas9
cctcagcctcctgagtagca

SEQ ID NO: 40339 - DNA, 19 bp, Artificial Sequence
  Synthetic: FXN 3 forward 9:69043697-69043719; SpCas9
ctcagcctcctgagtagca

SEQ ID NO: 40340 - DNA, 18 bp, Artificial Sequence
  Synthetic: FXN 3 forward 9:69043698-69043719; SpCas9
tcagcctcctgagtagca

SEQ ID NO: 40341 - DNA, 25 bp, Artificial Sequence
  Synthetic: FXN 3 reverse 9:69043693-69043721; SpCas9
atctgtgctactcaggaggctgagg

SEQ ID NO: 40342 - DNA, 24 bp, Artificial Sequence
  Synthetic: FXN 3 reverse 9:69043694-69043721; SpCas9
tctgtgctactcaggaggctgagg

SEQ ID NO: 40343 - DNA, 23 bp, Artificial Sequence
  Synthetic: FXN 3 reverse 9:69043695-69043721; SpCas9
ctgtgctactcaggaggctgagg

SEQ ID NO: 40344 - DNA, 22 bp, Artificial Sequence
  Synthetic: FXN 3 reverse 9:69043696-69043721; SpCas9
tgtgctactcaggaggctgagg

SEQ ID NO: 40345 - DNA, 21 bp, Artificial Sequence
  Synthetic: FXN 3 reverse 9:69043697-69043721; SpCas9
gtgctactcaggaggctgagg

SEQ ID NO: 40346 - DNA, 20 bp, Artificial Sequence
  Synthetic: FXN 3 reverse 9:69043698-69043721; SpCas9
tgctactcaggaggctgagg

SEQ ID NO: 40347 - DNA, 19 bp, Artificial Sequence
  Synthetic: FXN 3 reverse 9:69043699-69043721; SpCas9
gctactcaggaggctgagg

SEQ ID NO: 40348 - DNA, 18 bp, Artificial Sequence
  Synthetic: FXN 3 reverse 9:69043700-69043721; SpCas9
ctactcaggaggctgagg

SEQ ID NO: 40349 - DNA, 25 bp, Artificial Sequence
  Synthetic: FXN 3 reverse 9:69043696-69043724; SpCas9
gtaatctgtgctactcaggaggctg

SEQ ID NO: 40350 - DNA, 24 bp, Artificial Sequence
  Synthetic: FXN 3 reverse 9:69043697-69043724; SpCas9
taatctgtgctactcaggaggctg

SEQ ID NO: 40351 - DNA, 23 bp, Artificial Sequence
  Synthetic: FXN 3 reverse 9:69043698-69043724; SpCas9
aatctgtgctactcaggaggctg

SEQ ID NO: 40352 - DNA, 22 bp, Artificial Sequence
  Synthetic: FXN 3 reverse 9:69043699-69043724; SpCas9
atctgtgctactcaggaggctg

SEQ ID NO: 40353 - DNA, 21 bp, Artificial Sequence
  Synthetic: FXN 3 reverse 9:69043700-69043724; SpCas9
tctgtgctactcaggaggctg

SEQ ID NO: 40354 - DNA, 20 bp, Artificial Sequence
  Synthetic: FXN 3 reverse 9:69043701-69043724; SpCas9
ctgtgctactcaggaggctg

SEQ ID NO: 40355 - DNA, 19 bp, Artificial Sequence
  Synthetic: FXN 3 reverse 9:69043702-69043724; SpCas9
tgtgctactcaggaggctg

SEQ ID NO: 40356 - DNA, 18 bp, Artificial Sequence
  Synthetic: FXN 3 reverse 9:69043703-69043724; SpCas9
gtgctactcaggaggctg

SEQ ID NO: 40357 - DNA, 25 bp, Artificial Sequence
  Synthetic: FXN 3 reverse 9:69043697-69043725; SpCas9
tgtaatctgtgctactcaggaggct

SEQ ID NO: 40358 - DNA, 24 bp, Artificial Sequence
  Synthetic: FXN 3 reverse 9:69043698-69043725; SpCas9
gtaatctgtgctactcaggaggct

SEQ ID NO: 40359 - DNA, 23 bp, Artificial Sequence
  Synthetic: FXN 3 reverse 9:69043699-69043725; SpCas9
taatctgtgctactcaggaggct

SEQ ID NO: 40360 - DNA, 22 bp, Artificial Sequence
  Synthetic: FXN 3 reverse 9:69043700-69043725; SpCas9
aatctgtgctactcaggaggct

SEQ ID NO: 40361 - DNA, 21 bp, Artificial Sequence
  Synthetic: FXN 3 reverse 9:69043701-69043725; SpCas9
atctgtgctactcaggaggct

SEQ ID NO: 40362 - DNA, 20 bp, Artificial Sequence
  Synthetic: FXN 3 reverse 9:69043702-69043725; SpCas9
tctgtgctactcaggaggct

SEQ ID NO: 40363 - DNA, 19 bp, Artificial Sequence
  Synthetic: FXN 3 reverse 9:69043703-69043725; SpCas9
ctgtgctactcaggaggct

SEQ ID NO: 40364 - DNA, 18 bp, Artificial Sequence
  Synthetic: FXN 3 reverse 9:69043704-69043725; SpCas9
tgtgctactcaggaggct

SEQ ID NO: 40365 - DNA, 25 bp, Artificial Sequence
  Synthetic: FXN 3 forward 9:69043698-69043726; SpCas9
tcagcctcctgagtagcacagatta

SEQ ID NO: 40366 - DNA, 24 bp, Artificial Sequence
  Synthetic: FXN 3 forward 9:69043699-69043726; SpCas9
cagcctcctgagtagcacagatta

SEQ ID NO: 40367 - DNA, 23 bp, Artificial Sequence
  Synthetic: FXN 3 forward 9:69043700-69043726; SpCas9
agcctcctgagtagcacagatta

SEQ ID NO: 40368 - DNA, 22 bp, Artificial Sequence
  Synthetic: FXN 3 forward 9:69043701-69043726; SpCas9
gcctcctgagtagcacagatta

SEQ ID NO: 40369 - DNA, 21 bp, Artificial Sequence
  Synthetic: FXN 3 forward 9:69043702-69043726; SpCas9
cctcctgagtagcacagatta

SEQ ID NO: 40370 - DNA, 20 bp, Artificial Sequence
  Synthetic: FXN 3 forward 9:69043703-69043726; SpCas9
ctcctgagtagcacagatta

SEQ ID NO: 40371 - DNA, 19 bp, Artificial Sequence
  Synthetic: FXN 3 forward 9:69043704-69043726; SpCas9
tcctgagtagcacagatta

SEQ ID NO: 40372 - DNA, 18 bp, Artificial Sequence
  Synthetic: FXN 3 forward 9:69043705-69043726; SpCas9
cctgagtagcacagatta

SEQ ID NO: 40373 - DNA, 25 bp, Artificial Sequence
  Synthetic: FXN 3 forward 9:69043699-69043727; SpCas9
cagcctcctgagtagcacagattac

SEQ ID NO: 40374 - DNA, 24 bp, Artificial Sequence
  Synthetic: FXN 3 forward 9:69043700-69043727; SpCas9
agcctcctgagtagcacagattac

SEQ ID NO: 40375 - DNA, 23 bp, Artificial Sequence
  Synthetic: FXN 3 forward 9:69043701-69043727; SpCas9
gcctcctgagtagcacagattac

SEQ ID NO: 40376 - DNA, 22 bp, Artificial Sequence
  Synthetic: FXN 3 forward 9:69043702-69043727; SpCas9
cctcctgagtagcacagattac

SEQ ID NO: 40377 - DNA, 21 bp, Artificial Sequence
  Synthetic: FXN 3 forward 9:69043703-69043727; SpCas9
ctcctgagtagcacagattac

SEQ ID NO: 40378 - DNA, 20 bp, Artificial Sequence
  Synthetic: FXN 3 forward 9:69043704-69043727; SpCas9
tcctgagtagcacagattac

SEQ ID NO: 40379 - DNA, 19 bp, Artificial Sequence
  Synthetic: FXN 3 forward 9:69043705-69043727; SpCas9
cctgagtagcacagattac

SEQ ID NO: 40380 - DNA, 18 bp, Artificial Sequence
  Synthetic: FXN 3 forward 9:69043706-69043727; SpCas9
ctgagtagcacagattac

SEQ ID NO: 40381 - DNA, 25 bp, Artificial Sequence
  Synthetic: FXN 3 reverse 9:69043702-69043730; SpCas9
gtgcctgtaatctgtgctactcagg

SEQ ID NO: 40382 - DNA, 24 bp, Artificial Sequence
  Synthetic: FXN 3 reverse 9:69043703-69043730; SpCas9
tgcctgtaatctgtgctactcagg

SEQ ID NO: 40383 - DNA, 23 bp, Artificial Sequence
  Synthetic: FXN 3 reverse 9:69043704-69043730; SpCas9
gcctgtaatctgtgctactcagg

SEQ ID NO: 40384 - DNA, 22 bp, Artificial Sequence
  Synthetic: FXN 3 reverse 9:69043705-69043730; SpCas9
cctgtaatctgtgctactcagg

SEQ ID NO: 40385 - DNA, 21 bp, Artificial Sequence
  Synthetic: FXN 3 reverse 9:69043706-69043730; SpCas9
ctgtaatctgtgctactcagg

SEQ ID NO: 40386 - DNA, 20 bp, Artificial Sequence
  Synthetic: FXN 3 reverse 9:69043707-69043730; SpCas9
tgtaatctgtgctactcagg

SEQ ID NO: 40387 - DNA, 19 bp, Artificial Sequence
  Synthetic: FXN 3 reverse 9:69043708-69043730; SpCas9
gtaatctgtgctactcagg

SEQ ID NO: 40388 - DNA, 18 bp, Artificial Sequence
  Synthetic: FXN 3 reverse 9:69043709-69043730; SpCas9
taatctgtgctactcagg

SEQ ID NO: 40389 - DNA, 25 bp, Artificial Sequence
  Synthetic: FXN 3 reverse 9:69043703-69043731; SpCas9
tgtgcctgtaatctgtgctactcag

SEQ ID NO: 40390 - DNA, 24 bp, Artificial Sequence
  Synthetic: FXN 3 reverse 9:69043704-69043731; SpCas9
gtgcctgtaatctgtgctactcag

SEQ ID NO: 40391 - DNA, 23 bp, Artificial Sequence
  Synthetic: FXN 3 reverse 9:69043705-69043731; SpCas9
tgcctgtaatctgtgctactcag

SEQ ID NO: 40392 - DNA, 22 bp, Artificial Sequence
  Synthetic: FXN 3 reverse 9:69043706-69043731; SpCas9
gcctgtaatctgtgctactcag

SEQ ID NO: 40393 - DNA, 21 bp, Artificial Sequence
  Synthetic: FXN 3 reverse 9:69043707-69043731; SpCas9
cctgtaatctgtgctactcag

SEQ ID NO: 40394 - DNA, 20 bp, Artificial Sequence
  Synthetic: FXN 3 reverse 9:69043708-69043731; SpCas9
ctgtaatctgtgctactcag

SEQ ID NO: 40395 - DNA, 19 bp, Artificial Sequence
  Synthetic: FXN 3 reverse 9:69043709-69043731; SpCas9
tgtaatctgtgctactcag

SEQ ID NO: 40396 - DNA, 18 bp, Artificial Sequence
  Synthetic: FXN 3 reverse 9:69043710-69043731; SpCas9
gtaatctgtgctactcag

SEQ ID NO: 40397 - DNA, 25 bp, Artificial Sequence
  Synthetic: FXN 3 reverse 9:69043705-69043733; SpCas9
catgtgcctgtaatctgtgctactc

SEQ ID NO: 40398 - DNA, 24 bp, Artificial Sequence
  Synthetic: FXN 3 reverse 9:69043706-69043733; SpCas9
atgtgcctgtaatctgtgctactc

SEQ ID NO: 40399 - DNA, 23 bp, Artificial Sequence
  Synthetic: FXN 3 reverse 9:69043707-69043733; SpCas9
tgtgcctgtaatctgtgctactc

SEQ ID NO: 40400 - DNA, 22 bp, Artificial Sequence
  Synthetic: FXN 3 reverse 9:69043708-69043733; SpCas9
gtgcctgtaatctgtgctactc

SEQ ID NO: 40401 - DNA, 21 bp, Artificial Sequence
  Synthetic: FXN 3 reverse 9:69043709-69043733; SpCas9
tgcctgtaatctgtgctactc

SEQ ID NO: 40402 - DNA, 20 bp, Artificial Sequence
  Synthetic: FXN 3 reverse 9:69043710-69043733; SpCas9
gcctgtaatctgtgctactc

SEQ ID NO: 40403 - DNA, 19 bp, Artificial Sequence
  Synthetic: FXN 3 reverse 9:69043711-69043733; SpCas9
cctgtaatctgtgctactc

SEQ ID NO: 40404 - DNA, 18 bp, Artificial Sequence
  Synthetic: FXN 3 reverse 9:69043712-69043733; SpCas9
ctgtaatctgtgctactc

SEQ ID NO: 40405 - DNA, 25 bp, Artificial Sequence
  Synthetic: FXN 3 reverse 9:69043706-69043734; SpCas9
acatgtgcctgtaatctgtgctact

SEQ ID NO: 40406 - DNA, 24 bp, Artificial Sequence
  Synthetic: FXN 3 reverse 9:69043707-69043734; SpCas9
catgtgcctgtaatctgtgctact

SEQ ID NO: 40407 - DNA, 23 bp, Artificial Sequence
  Synthetic: FXN 3 reverse 9:69043708-69043734; SpCas9
atgtgcctgtaatctgtgctact

SEQ ID NO: 40408 - DNA, 22 bp, Artificial Sequence
  Synthetic: FXN 3 reverse 9:69043709-69043734; SpCas9
tgtgcctgtaatctgtgctact

SEQ ID NO: 40409 - DNA, 21 bp, Artificial Sequence
  Synthetic: FXN 3 reverse 9:69043710-69043734; SpCas9
gtgcctgtaatctgtgctact

SEQ ID NO: 40410 - DNA, 20 bp, Artificial Sequence
  Synthetic: FXN 3 reverse 9:69043711-69043734; SpCas9
tgcctgtaatctgtgctact

SEQ ID NO: 40411 - DNA, 19 bp, Artificial Sequence
  Synthetic: FXN 3 reverse 9:69043712-69043734; SpCas9
gcctgtaatctgtgctact

SEQ ID NO: 40412 - DNA, 18 bp, Artificial Sequence
  Synthetic: FXN 3 reverse 9:69043713-69043734; SpCas9
cctgtaatctgtgctact

SEQ ID NO: 40413 - DNA, 25 bp, Artificial Sequence
  Synthetic: FXN 3 forward 9:69043737-69043765; SpCas9
cacgccttgctaatttttgtgtttt

SEQ ID NO: 40414 - DNA, 24 bp, Artificial Sequence
  Synthetic: FXN 3 forward 9:69043738-69043765; SpCas9
acgccttgctaatttttgtgtttt

SEQ ID NO: 40415 - DNA, 23 bp, Artificial Sequence
  Synthetic: FXN 3 forward 9:69043739-69043765; SpCas9
cgccttgctaatttttgtgtttt

SEQ ID NO: 40416 - DNA, 22 bp, Artificial Sequence
  Synthetic: FXN 3 forward 9:69043740-69043765; SpCas9
gccttgctaatttttgtgtttt

SEQ ID NO: 40417 - DNA, 21 bp, Artificial Sequence
  Synthetic: FXN 3 forward 9:69043741-69043765; SpCas9
ccttgctaatttttgtgtttt

SEQ ID NO: 40418 - DNA, 20 bp, Artificial Sequence
  Synthetic: FXN 3 forward 9:69043742-69043765; SpCas9
cttgctaatttttgtgtttt

SEQ ID NO: 40419 - DNA, 19 bp, Artificial Sequence
  Synthetic: FXN 3 forward 9:69043743-69043765; SpCas9
ttgctaatttttgtgtttt

SEQ ID NO: 40420 - DNA, 18 bp, Artificial Sequence
  Synthetic: FXN 3 forward 9:69043744-69043765; SpCas9
tgctaatttttgtgtttt

SEQ ID NO: 40421 - DNA, 25 bp, Artificial Sequence
  Synthetic: FXN 3 forward 9:69043740-69043768; SpCas9
gccttgctaatttttgtgtttttag

SEQ ID NO: 40422 - DNA, 24 bp, Artificial Sequence
  Synthetic: FXN 3 forward 9:69043741-69043768; SpCas9
ccttgctaatttttgtgtttttag

SEQ ID NO: 40423 - DNA, 23 bp, Artificial Sequence
  Synthetic: FXN 3 forward 9:69043742-69043768; SpCas9
cttgctaatttttgtgtttttag

SEQ ID NO: 40424 - DNA, 22 bp, Artificial Sequence
  Synthetic: FXN 3 forward 9:69043743-69043768; SpCas9
ttgctaatttttgtgtttttag

SEQ ID NO: 40425 - DNA, 21 bp, Artificial Sequence
  Synthetic: FXN 3 forward 9:69043744-69043768; SpCas9
tgctaatttttgtgtttttag

SEQ ID NO: 40426 - DNA, 20 bp, Artificial Sequence
  Synthetic: FXN 3 forward 9:69043745-69043768; SpCas9
gctaatttttgtgtttttag

SEQ ID NO: 40427 - DNA, 19 bp, Artificial Sequence
  Synthetic: FXN 3 forward 9:69043746-69043768; SpCas9
ctaatttttgtgtttttag

SEQ ID NO: 40428 - DNA, 18 bp, Artificial Sequence
  Synthetic: FXN 3 forward 9:69043747-69043768; SpCas9
taatttttgtgtttttag

SEQ ID NO: 40429 - DNA, 25 bp, Artificial Sequence
  Synthetic: FXN 3 reverse 9:69043741-69043769; SpCas9
tctactaaaaacacaaaaattagca

SEQ ID NO: 40430 - DNA, 24 bp, Artificial Sequence
  Synthetic: FXN 3 reverse 9:69043742-69043769; SpCas9
ctactaaaaacacaaaaattagca

SEQ ID NO: 40431 - DNA, 23 bp, Artificial Sequence
  Synthetic: FXN 3 reverse 9:69043743-69043769; SpCas9
tactaaaaacacaaaaattagca

SEQ ID NO: 40432 - DNA, 22 bp, Artificial Sequence
  Synthetic: FXN 3 reverse 9:69043744-69043769; SpCas9
actaaaaacacaaaaattagca

SEQ ID NO: 40433 - DNA, 21 bp, Artificial Sequence
  Synthetic: FXN 3 reverse 9:69043745-69043769; SpCas9
ctaaaaacacaaaaattagca

SEQ ID NO: 40434 - DNA, 20 bp, Artificial Sequence
  Synthetic: FXN 3 reverse 9:69043746-69043769; SpCas9
taaaaacacaaaaattagca

SEQ ID NO: 40435 - DNA, 19 bp, Artificial Sequence
  Synthetic: FXN 3 reverse 9:69043747-69043769; SpCas9
aaaaacacaaaaattagca

SEQ ID NO: 40436 - DNA, 18 bp, Artificial Sequence
  Synthetic: FXN 3 reverse 9:69043748-69043769; SpCas9
aaaacacaaaaattagca

SEQ ID NO: 40437 - DNA, 25 bp, Artificial Sequence
  Synthetic: FXN 3 forward 9:69043742-69043770; SpCas9
cttgctaatttttgtgtttttagta

SEQ ID NO: 40438 - DNA, 24 bp, Artificial Sequence
  Synthetic: FXN 3 forward 9:69043743-69043770; SpCas9
ttgctaatttttgtgtttttagta

SEQ ID NO: 40439 - DNA, 23 bp, Artificial Sequence
  Synthetic: FXN 3 forward 9:69043744-69043770; SpCas9
tgctaatttttgtgtttttagta

SEQ ID NO: 40440 - DNA, 22 bp, Artificial Sequence
  Synthetic: FXN 3 forward 9:69043745-69043770; SpCas9
gctaatttttgtgtttttagta

SEQ ID NO: 40441 - DNA, 21 bp, Artificial Sequence
  Synthetic: FXN 3 forward 9:69043746-69043770; SpCas9
ctaatttttgtgtttttagta

SEQ ID NO: 40442 - DNA, 20 bp, Artificial Sequence
  Synthetic: FXN 3 forward 9:69043747-69043770; SpCas9
taatttttgtgtttttagta

SEQ ID NO: 40443 - DNA, 19 bp, Artificial Sequence
  Synthetic: FXN 3 forward 9:69043748-69043770; SpCas9
aatttttgtgtttttagta

SEQ ID NO: 40444 - DNA, 18 bp, Artificial Sequence
  Synthetic: FXN 3 forward 9:69043749-69043770; SpCas9
atttttgtgtttttagta

SEQ ID NO: 40445 - DNA, 25 bp, Artificial Sequence
  Synthetic: FXN 3 reverse 9:69043742-69043770; SpCas9
ctctactaaaaacacaaaaattagc

SEQ ID NO: 40446 - DNA, 24 bp, Artificial Sequence
  Synthetic: FXN 3 reverse 9:69043743-69043770; SpCas9
tctactaaaaacacaaaaattagc

SEQ ID NO: 40447 - DNA, 23 bp, Artificial Sequence
  Synthetic: FXN 3 reverse 9:69043744-69043770; SpCas9
ctactaaaaacacaaaaattagc

SEQ ID NO: 40448 - DNA, 22 bp, Artificial Sequence
  Synthetic: FXN 3 reverse 9:69043745-69043770; SpCas9
tactaaaaacacaaaaattagc

SEQ ID NO: 40449 - DNA, 21 bp, Artificial Sequence
  Synthetic: FXN 3 reverse 9:69043746-69043770; SpCas9
actaaaaacacaaaaattagc

SEQ ID NO: 40450 - DNA, 20 bp, Artificial Sequence
  Synthetic: FXN 3 reverse 9:69043747-69043770; SpCas9
ctaaaaacacaaaaattagc

SEQ ID NO: 40451 - DNA, 19 bp, Artificial Sequence
  Synthetic: FXN 3 reverse 9:69043748-69043770; SpCas9
taaaaacacaaaaattagc

SEQ ID NO: 40452 - DNA, 18 bp, Artificial Sequence
  Synthetic: FXN 3 reverse 9:69043749-69043770; SpCas9
aaaaacacaaaaattagc

SEQ ID NO: 40453 - DNA, 25 bp, Artificial Sequence
  Synthetic: FXN 3 forward 9:69043743-69043771; SpCas9
ttgctaatttttgtgtttttagtag

SEQ ID NO: 40454 - DNA, 24 bp, Artificial Sequence
  Synthetic: FXN 3 forward 9:69043744-69043771; SpCas9
tgctaatttttgtgtttttagtag

SEQ ID NO: 40455 - DNA, 23 bp, Artificial Sequence
  Synthetic: FXN 3 forward 9:69043745-69043771; SpCas9
gctaatttttgtgtttttagtag

SEQ ID NO: 40456 - DNA, 22 bp, Artificial Sequence
  Synthetic: FXN 3 forward 9:69043746-69043771; SpCas9
ctaatttttgtgtttttagtag

SEQ ID NO: 40457 - DNA, 21 bp, Artificial Sequence
  Synthetic: FXN 3 forward 9:69043747-69043771; SpCas9
taatttttgtgtttttagtag

SEQ ID NO: 40458 - DNA, 20 bp, Artificial Sequence
  Synthetic: FXN 3 forward 9:69043748-69043771; SpCas9
aatttttgtgtttttagtag

SEQ ID NO: 40459 - DNA, 19 bp, Artificial Sequence
  Synthetic: FXN 3 forward 9:69043749-69043771; SpCas9
atttttgtgtttttagtag

SEQ ID NO: 40460 - DNA, 18 bp, Artificial Sequence
  Synthetic: FXN 3 forward 9:69043750-69043771; SpCas9
tttttgtgtttttagtag

SEQ ID NO: 40461 - DNA, 25 bp, Artificial Sequence
  Synthetic: FXN 3 forward 9:69043746-69043774; SpCas9
ctaatttttgtgtttttagtagagg

SEQ ID NO: 40462 - DNA, 24 bp, Artificial Sequence
  Synthetic: FXN 3 forward 9:69043747-69043774; SpCas9
taatttttgtgtttttagtagagg

SEQ ID NO: 40463 - DNA, 23 bp, Artificial Sequence
  Synthetic: FXN 3 forward 9:69043748-69043774; SpCas9
aatttttgtgtttttagtagagg

SEQ ID NO: 40464 - DNA, 22 bp, Artificial Sequence
  Synthetic: FXN 3 forward 9:69043749-69043774; SpCas9
atttttgtgtttttagtagagg

SEQ ID NO: 40465 - DNA, 21 bp, Artificial Sequence
  Synthetic: FXN 3 forward 9:69043750-69043774; SpCas9
tttttgtgtttttagtagagg

SEQ ID NO: 40466 - DNA, 20 bp, Artificial Sequence
  Synthetic: FXN 3 forward 9:69043751-69043774; SpCas9
ttttgtgtttttagtagagg

SEQ ID NO: 40467 - DNA, 19 bp, Artificial Sequence
  Synthetic: FXN 3 forward 9:69043752-69043774; SpCas9
tttgtgtttttagtagagg

SEQ ID NO: 40468 - DNA, 18 bp, Artificial Sequence
  Synthetic: FXN 3 forward 9:69043753-69043774; SpCas9
ttgtgtttttagtagagg

SEQ ID NO: 40469 - DNA, 25 bp, Artificial Sequence
  Synthetic: FXN 3 reverse 9:69043746-69043774; SpCas9
ccgcctctactaaaaacacaaaaat

SEQ ID NO: 40470 - DNA, 24 bp, Artificial Sequence
  Synthetic: FXN 3 reverse 9:69043747-69043774; SpCas9
cgcctctactaaaaacacaaaaat

SEQ ID NO: 40471 - DNA, 23 bp, Artificial Sequence
  Synthetic: FXN 3 reverse 9:69043748-69043774; SpCas9
gcctctactaaaaacacaaaaat

SEQ ID NO: 40472 - DNA, 22 bp, Artificial Sequence
  Synthetic: FXN 3 reverse 9:69043749-69043774; SpCas9
cctctactaaaaacacaaaaat

SEQ ID NO: 40473 - DNA, 21 bp, Artificial Sequence
  Synthetic: FXN 3 reverse 9:69043750-69043774; SpCas9
ctctactaaaaacacaaaaat

SEQ ID NO: 40474 - DNA, 20 bp, Artificial Sequence
  Synthetic: FXN 3 reverse 9:69043751-69043774; SpCas9
tctactaaaaacacaaaaat

SEQ ID NO: 40475 - DNA, 19 bp, Artificial Sequence
  Synthetic: FXN 3 reverse 9:69043752-69043774; SpCas9
ctactaaaaacacaaaaat

SEQ ID NO: 40476 - DNA, 18 bp, Artificial Sequence
  Synthetic: FXN 3 reverse 9:69043753-69043774; SpCas9
tactaaaaacacaaaaat

SEQ ID NO: 40477 - DNA, 25 bp, Artificial Sequence
  Synthetic: FXN 3 forward 9:69043747-69043775; SpCas9
taatttttgtgtttttagtagaggc

SEQ ID NO: 40478 - DNA, 24 bp, Artificial Sequence
  Synthetic: FXN 3 forward 9:69043748-69043775; SpCas9
aatttttgtgtttttagtagaggc

SEQ ID NO: 40479 - DNA, 23 bp, Artificial Sequence
  Synthetic: FXN 3 forward 9:69043749-69043775; SpCas9
atttttgtgtttttagtagaggc

SEQ ID NO: 40480 - DNA, 22 bp, Artificial Sequence
  Synthetic: FXN 3 forward 9:69043750-69043775; SpCas9
tttttgtgtttttagtagaggc

SEQ ID NO: 40481 - DNA, 21 bp, Artificial Sequence
  Synthetic: FXN 3 forward 9:69043751-69043775; SpCas9
ttttgtgtttttagtagaggc

SEQ ID NO: 40482 - DNA, 20 bp, Artificial Sequence
  Synthetic: FXN 3 forward 9:69043752-69043775; SpCas9
tttgtgtttttagtagaggc

SEQ ID NO: 40483 - DNA, 19 bp, Artificial Sequence
  Synthetic: FXN 3 forward 9:69043753-69043775; SpCas9
ttgtgtttttagtagaggc

SEQ ID NO: 40484 - DNA, 18 bp, Artificial Sequence
  Synthetic: FXN 3 forward 9:69043754-69043775; SpCas9
tgtgtttttagtagaggc

SEQ ID NO: 40485 - DNA, 25 bp, Artificial Sequence
  Synthetic: FXN 3 forward 9:69043748-69043776; SpCas9
aatttttgtgtttttagtagaggcg

SEQ ID NO: 40486 - DNA, 24 bp, Artificial Sequence
  Synthetic: FXN 3 forward 9:69043749-69043776; SpCas9
atttttgtgtttttagtagaggcg

SEQ ID NO: 40487 - DNA, 23 bp, Artificial Sequence
  Synthetic: FXN 3 forward 9:69043750-69043776; SpCas9
tttttgtgtttttagtagaggcg

SEQ ID NO: 40488 - DNA, 22 bp, Artificial Sequence
  Synthetic: FXN 3 forward 9:69043751-69043776; SpCas9
ttttgtgtttttagtagaggcg

SEQ ID NO: 40489 - DNA, 21 bp, Artificial Sequence
  Synthetic: FXN 3 forward 9:69043752-69043776; SpCas9
tttgtgtttttagtagaggcg

SEQ ID NO: 40490 - DNA, 20 bp, Artificial Sequence
  Synthetic: FXN 3 forward 9:69043753-69043776; SpCas9
ttgtgtttttagtagaggcg

SEQ ID NO: 40491 - DNA, 19 bp, Artificial Sequence
  Synthetic: FXN 3 forward 9:69043754-69043776; SpCas9
tgtgtttttagtagaggcg

SEQ ID NO: 40492 - DNA, 18 bp, Artificial Sequence
  Synthetic: FXN 3 forward 9:69043755-69043776; SpCas9
gtgtttttagtagaggcg

SEQ ID NO: 40493 - DNA, 25 bp, Artificial Sequence
  Synthetic: FXN 3 forward 9:69043762-69043790; SpCas9
tagtagaggcggggtttcaccatgt

SEQ ID NO: 40494 - DNA, 24 bp, Artificial Sequence
  Synthetic: FXN 3 forward 9:69043763-69043790; SpCas9
agtagaggcggggtttcaccatgt

SEQ ID NO: 40495 - DNA, 23 bp, Artificial Sequence
  Synthetic: FXN 3 forward 9:69043764-69043790; SpCas9
gtagaggcggggtttcaccatgt

SEQ ID NO: 40496 - DNA, 22 bp, Artificial Sequence
  Synthetic: FXN 3 forward 9:69043765-69043790; SpCas9
tagaggcggggtttcaccatgt

SEQ ID NO: 40497 - DNA, 21 bp, Artificial Sequence
  Synthetic: FXN 3 forward 9:69043766-69043790; SpCas9
agaggcggggtttcaccatgt

SEQ ID NO: 40498 - DNA, 20 bp, Artificial Sequence
  Synthetic: FXN 3 forward 9:69043767-69043790; SpCas9
gaggcggggtttcaccatgt

SEQ ID NO: 40499 - DNA, 19 bp, Artificial Sequence
  Synthetic: FXN 3 forward 9:69043768-69043790; SpCas9
aggcggggtttcaccatgt

SEQ ID NO: 40500 - DNA, 18 bp, Artificial Sequence
  Synthetic: FXN 3 forward 9:69043769-69043790; SpCas9
ggcggggtttcaccatgt

SEQ ID NO: 40501 - DNA, 25 bp, Artificial Sequence
  Synthetic: FXN 3 forward 9:69043766-69043794; SpCas9
agaggcggggtttcaccatgttggc

SEQ ID NO: 40502 - DNA, 24 bp, Artificial Sequence
  Synthetic: FXN 3 forward 9:69043767-69043794; SpCas9
gaggcggggtttcaccatgttggc

SEQ ID NO: 40503 - DNA, 23 bp, Artificial Sequence
  Synthetic: FXN 3 forward 9:69043768-69043794; SpCas9
aggcggggtttcaccatgttggc

SEQ ID NO: 40504 - DNA, 22 bp, Artificial Sequence
  Synthetic: FXN 3 forward 9:69043769-69043794; SpCas9
ggcggggtttcaccatgttggc

SEQ ID NO: 40505 - DNA, 21 bp, Artificial Sequence
  Synthetic: FXN 3 forward 9:69043770-69043794; SpCas9
gcggggtttcaccatgttggc

SEQ ID NO: 40506 - DNA, 20 bp, Artificial Sequence
  Synthetic: FXN 3 forward 9:69043771-69043794; SpCas9
cggggtttcaccatgttggc

SEQ ID NO: 40507 - DNA, 19 bp, Artificial Sequence
  Synthetic: FXN 3 forward 9:69043772-69043794; SpCas9
ggggtttcaccatgttggc

SEQ ID NO: 40508 - DNA, 18 bp, Artificial Sequence
  Synthetic: FXN 3 forward 9:69043773-69043794; SpCas9
gggtttcaccatgttggc

SEQ ID NO: 40509 - DNA, 25 bp, Artificial Sequence
  Synthetic: FXN 3 forward 9:69043767-69043795; SpCas9
gaggcggggtttcaccatgttggcc

SEQ ID NO: 40510 - DNA, 24 bp, Artificial Sequence
  Synthetic: FXN 3 forward 9:69043768-69043795; SpCas9
aggcggggtttcaccatgttggcc

SEQ ID NO: 40511 - DNA, 23 bp, Artificial Sequence
  Synthetic: FXN 3 forward 9:69043769-69043795; SpCas9
ggcggggtttcaccatgttggcc

SEQ ID NO: 40512 - DNA, 22 bp, Artificial Sequence
  Synthetic: FXN 3 forward 9:69043770-69043795; SpCas9
gcggggtttcaccatgttggcc

SEQ ID NO: 40513 - DNA, 21 bp, Artificial Sequence
  Synthetic: FXN 3 forward 9:69043771-69043795; SpCas9
cggggtttcaccatgttggcc

SEQ ID NO: 40514 - DNA, 20 bp, Artificial Sequence
  Synthetic: FXN 3 forward 9:69043772-69043795; SpCas9
ggggtttcaccatgttggcc

SEQ ID NO: 40515 - DNA, 19 bp, Artificial Sequence
  Synthetic: FXN 3 forward 9:69043773-69043795; SpCas9
gggtttcaccatgttggcc

SEQ ID NO: 40516 - DNA, 18 bp, Artificial Sequence
  Synthetic: FXN 3 forward 9:69043774-69043795; SpCas9
ggtttcaccatgttggcc

SEQ ID NO: 40517 - DNA, 25 bp, Artificial Sequence
  Synthetic: FXN 3 forward 9:69043771-69043799; SpCas9
cggggtttcaccatgttggccaggc

SEQ ID NO: 40518 - DNA, 24 bp, Artificial Sequence
  Synthetic: FXN 3 forward 9:69043772-69043799; SpCas9
ggggtttcaccatgttggccaggc

SEQ ID NO: 40519 - DNA, 23 bp, Artificial Sequence
  Synthetic: FXN 3 forward 9:69043773-69043799; SpCas9
gggtttcaccatgttggccaggc

SEQ ID NO: 40520 - DNA, 22 bp, Artificial Sequence
  Synthetic: FXN 3 forward 9:69043774-69043799; SpCas9
ggtttcaccatgttggccaggc

SEQ ID NO: 40521 - DNA, 21 bp, Artificial Sequence
  Synthetic: FXN 3 forward 9:69043775-69043799; SpCas9
gtttcaccatgttggccaggc

SEQ ID NO: 40522 - DNA, 20 bp, Artificial Sequence
  Synthetic: FXN 3 forward 9:69043776-69043799; SpCas9
tttcaccatgttggccaggc

SEQ ID NO: 40523 - DNA, 19 bp, Artificial Sequence
  Synthetic: FXN 3 forward 9:69043777-69043799; SpCas9
ttcaccatgttggccaggc

SEQ ID NO: 40524 - DNA, 18 bp, Artificial Sequence
  Synthetic: FXN 3 forward 9:69043778-69043799; SpCas9
tcaccatgttggccaggc

SEQ ID NO: 40525 - DNA, 25 bp, Artificial Sequence
  Synthetic: FXN 3 reverse 9:69043781-69043809; SpCas9
gagttcaagactagcctggccaaca

SEQ ID NO: 40526 - DNA, 24 bp, Artificial Sequence
  Synthetic: FXN 3 reverse 9:69043782-69043809; SpCas9
agttcaagactagcctggccaaca

SEQ ID NO: 40527 - DNA, 23 bp, Artificial Sequence
  Synthetic: FXN 3 reverse 9:69043783-69043809; SpCas9
gttcaagactagcctggccaaca

SEQ ID NO: 40528 - DNA, 22 bp, Artificial Sequence
  Synthetic: FXN 3 reverse 9:69043784-69043809; SpCas9
ttcaagactagcctggccaaca

SEQ ID NO: 40529 - DNA, 21 bp, Artificial Sequence
  Synthetic: FXN 3 reverse 9:69043785-69043809; SpCas9
tcaagactagcctggccaaca

SEQ ID NO: 40530 - DNA, 20 bp, Artificial Sequence
  Synthetic: FXN 3 reverse 9:69043786-69043809; SpCas9
caagactagcctggccaaca

SEQ ID NO: 40531 - DNA, 19 bp, Artificial Sequence
  Synthetic: FXN 3 reverse 9:69043787-69043809; SpCas9
aagactagcctggccaaca

SEQ ID NO: 40532 - DNA, 18 bp, Artificial Sequence
  Synthetic: FXN 3 reverse 9:69043788-69043809; SpCas9
agactagcctggccaaca

SEQ ID NO: 40533 - DNA, 25 bp, Artificial Sequence
  Synthetic: FXN 3 reverse 9:69043790-69043818; SpCas9
tgaggtcaggagttcaagactagcc

SEQ ID NO: 40534 - DNA, 24 bp, Artificial Sequence
  Synthetic: FXN 3 reverse 9:69043791-69043818; SpCas9
gaggtcaggagttcaagactagcc

SEQ ID NO: 40535 - DNA, 23 bp, Artificial Sequence
  Synthetic: FXN 3 reverse 9:69043792-69043818; SpCas9
aggtcaggagttcaagactagcc

SEQ ID NO: 40536 - DNA, 22 bp, Artificial Sequence
  Synthetic: FXN 3 reverse 9:69043793-69043818; SpCas9
ggtcaggagttcaagactagcc

SEQ ID NO: 40537 - DNA, 21 bp, Artificial Sequence
  Synthetic: FXN 3 reverse 9:69043794-69043818; SpCas9
gtcaggagttcaagactagcc

SEQ ID NO: 40538 - DNA, 20 bp, Artificial Sequence
  Synthetic: FXN 3 reverse 9:69043795-69043818; SpCas9
tcaggagttcaagactagcc

SEQ ID NO: 40539 - DNA, 19 bp, Artificial Sequence
  Synthetic: FXN 3 reverse 9:69043796-69043818; SpCas9
caggagttcaagactagcc

SEQ ID NO: 40540 - DNA, 18 bp, Artificial Sequence
  Synthetic: FXN 3 reverse 9:69043797-69043818; SpCas9
aggagttcaagactagcc

SEQ ID NO: 40541 - DNA, 25 bp, Artificial Sequence
  Synthetic: FXN 3 forward 9:69043791-69043819; SpCas9
caggctagtcttgaactcctgacct

SEQ ID NO: 40542 - DNA, 24 bp, Artificial Sequence
  Synthetic: FXN 3 forward 9:69043792-69043819; SpCas9
aggctagtcttgaactcctgacct

SEQ ID NO: 40543 - DNA, 23 bp, Artificial Sequence
  Synthetic: FXN 3 forward 9:69043793-69043819; SpCas9
ggctagtcttgaactcctgacct

SEQ ID NO: 40544 - DNA, 22 bp, Artificial Sequence
  Synthetic: FXN 3 forward 9:69043794-69043819; SpCas9
gctagtcttgaactcctgacct

SEQ ID NO: 40545 - DNA, 21 bp, Artificial Sequence
  Synthetic: FXN 3 forward 9:69043795-69043819; SpCas9
ctagtcttgaactcctgacct

SEQ ID NO: 40546 - DNA, 20 bp, Artificial Sequence
  Synthetic: FXN 3 forward 9:69043796-69043819; SpCas9
tagtcttgaactcctgacct

SEQ ID NO: 40547 - DNA, 19 bp, Artificial Sequence
  Synthetic: FXN 3 forward 9:69043797-69043819; SpCas9
agtcttgaactcctgacct

SEQ ID NO: 40548 - DNA, 18 bp, Artificial Sequence
  Synthetic: FXN 3 forward 9:69043798-69043819; SpCas9
gtcttgaactcctgacct

SEQ ID NO: 40549 - DNA, 25 bp, Artificial Sequence
  Synthetic: FXN 3 forward 9:69043792-69043820; SpCas9
aggctagtcttgaactcctgacctc

SEQ ID NO: 40550 - DNA, 24 bp, Artificial Sequence
  Synthetic: FXN 3 forward 9:69043793-69043820; SpCas9
ggctagtcttgaactcctgacctc

SEQ ID NO: 40551 - DNA, 23 bp, Artificial Sequence
  Synthetic: FXN 3 forward 9:69043794-69043820; SpCas9
gctagtcttgaactcctgacctc

SEQ ID NO: 40552 - DNA, 22 bp, Artificial Sequence
  Synthetic: FXN 3 forward 9:69043795-69043820; SpCas9
ctagtcttgaactcctgacctc

SEQ ID NO: 40553 - DNA, 21 bp, Artificial Sequence
  Synthetic: FXN 3 forward 9:69043796-69043820; SpCas9
tagtcttgaactcctgacctc

SEQ ID NO: 40554 - DNA, 20 bp, Artificial Sequence
  Synthetic: FXN 3 forward 9:69043797-69043820; SpCas9
agtcttgaactcctgacctc

SEQ ID NO: 40555 - DNA, 19 bp, Artificial Sequence
  Synthetic: FXN 3 forward 9:69043798-69043820; SpCas9
gtcttgaactcctgacctc

SEQ ID NO: 40556 - DNA, 18 bp, Artificial Sequence
  Synthetic: FXN 3 forward 9:69043799-69043820; SpCas9
tcttgaactcctgacctc

SEQ ID NO: 40557 - DNA, 25 bp, Artificial Sequence
  Synthetic: FXN 3 reverse 9:69043795-69043823; SpCas9
tcacctgaggtcaggagttcaagac

SEQ ID NO: 40558 - DNA, 24 bp, Artificial Sequence
  Synthetic: FXN 3 reverse 9:69043796-69043823; SpCas9
cacctgaggtcaggagttcaagac

SEQ ID NO: 40559 - DNA, 23 bp, Artificial Sequence
  Synthetic: FXN 3 reverse 9:69043797-69043823; SpCas9
acctgaggtcaggagttcaagac

SEQ ID NO: 40560 - DNA, 22 bp, Artificial Sequence
  Synthetic: FXN 3 reverse 9:69043798-69043823; SpCas9
cctgaggtcaggagttcaagac

SEQ ID NO: 40561 - DNA, 21 bp, Artificial Sequence
  Synthetic: FXN 3 reverse 9:69043799-69043823; SpCas9
ctgaggtcaggagttcaagac

SEQ ID NO: 40562 - DNA, 20 bp, Artificial Sequence
  Synthetic: FXN 3 reverse 9:69043800-69043823; SpCas9
tgaggtcaggagttcaagac

SEQ ID NO: 40563 - DNA, 19 bp, Artificial Sequence
  Synthetic: FXN 3 reverse 9:69043801-69043823; SpCas9
gaggtcaggagttcaagac

SEQ ID NO: 40564 - DNA, 18 bp, Artificial Sequence
  Synthetic: FXN 3 reverse 9:69043802-69043823; SpCas9
aggtcaggagttcaagac

SEQ ID NO: 40565 - DNA, 25 bp, Artificial Sequence
  Synthetic: FXN 3 reverse 9:69043800-69043828; SpCas9
gtggatcacctgaggtcaggagttc

SEQ ID NO: 40566 - DNA, 24 bp, Artificial Sequence
  Synthetic: FXN 3 reverse 9:69043801-69043828; SpCas9
tggatcacctgaggtcaggagttc

SEQ ID NO: 40567 - DNA, 23 bp, Artificial Sequence
  Synthetic: FXN 3 reverse 9:69043802-69043828; SpCas9
ggatcacctgaggtcaggagttc

SEQ ID NO: 40568 - DNA, 22 bp, Artificial Sequence
  Synthetic: FXN 3 reverse 9:69043803-69043828; SpCas9
gatcacctgaggtcaggagttc

SEQ ID NO: 40569 - DNA, 21 bp, Artificial Sequence
  Synthetic: FXN 3 reverse 9:69043804-69043828; SpCas9
atcacctgaggtcaggagttc

SEQ ID NO: 40570 - DNA, 20 bp, Artificial Sequence
  Synthetic: FXN 3 reverse 9:69043805-69043828; SpCas9
tcacctgaggtcaggagttc

SEQ ID NO: 40571 - DNA, 19 bp, Artificial Sequence
  Synthetic: FXN 3 reverse 9:69043806-69043828; SpCas9
cacctgaggtcaggagttc

SEQ ID NO: 40572 - DNA, 18 bp, Artificial Sequence
  Synthetic: FXN 3 reverse 9:69043807-69043828; SpCas9
acctgaggtcaggagttc

SEQ ID NO: 40573 - DNA, 25 bp, Artificial Sequence
  Synthetic: FXN 3 reverse 9:69043806-69043834; SpCas9
aggcgggtggatcacctgaggtcag

SEQ ID NO: 40574 - DNA, 24 bp, Artificial Sequence
  Synthetic: FXN 3 reverse 9:69043807-69043834; SpCas9
ggcgggtggatcacctgaggtcag

SEQ ID NO: 40575 - DNA, 23 bp, Artificial Sequence
  Synthetic: FXN 3 reverse 9:69043808-69043834; SpCas9
gcgggtggatcacctgaggtcag

SEQ ID NO: 40576 - DNA, 22 bp, Artificial Sequence
  Synthetic: FXN 3 reverse 9:69043809-69043834; SpCas9
cgggtggatcacctgaggtcag

SEQ ID NO: 40577 - DNA, 21 bp, Artificial Sequence
  Synthetic: FXN 3 reverse 9:69043810-69043834; SpCas9
gggtggatcacctgaggtcag

SEQ ID NO: 40578 - DNA, 20 bp, Artificial Sequence
  Synthetic: FXN 3 reverse 9:69043811-69043834; SpCas9
ggtggatcacctgaggtcag

SEQ ID NO: 40579 - DNA, 19 bp, Artificial Sequence
  Synthetic: FXN 3 reverse 9:69043812-69043834; SpCas9
gtggatcacctgaggtcag

SEQ ID NO: 40580 - DNA, 18 bp, Artificial Sequence
  Synthetic: FXN 3 reverse 9:69043813-69043834; SpCas9
tggatcacctgaggtcag

SEQ ID NO: 40581 - DNA, 25 bp, Artificial Sequence
  Synthetic: FXN 3 reverse 9:69043808-69043836; SpCas9
ggaggcgggtggatcacctgaggtc

SEQ ID NO: 40582 - DNA, 24 bp, Artificial Sequence
  Synthetic: FXN 3 reverse 9:69043809-69043836; SpCas9
gaggcgggtggatcacctgaggtc

SEQ ID NO: 40583 - DNA, 23 bp, Artificial Sequence
  Synthetic: FXN 3 reverse 9:69043810-69043836; SpCas9
aggcgggtggatcacctgaggtc

SEQ ID NO: 40584 - DNA, 22 bp, Artificial Sequence
  Synthetic: FXN 3 reverse 9:69043811-69043836; SpCas9
ggcgggtggatcacctgaggtc

SEQ ID NO: 40585 - DNA, 21 bp, Artificial Sequence
  Synthetic: FXN 3 reverse 9:69043812-69043836; SpCas9
gcgggtggatcacctgaggtc

SEQ ID NO: 40586 - DNA, 20 bp, Artificial Sequence
  Synthetic: FXN 3 reverse 9:69043813-69043836; SpCas9
cgggtggatcacctgaggtc

SEQ ID NO: 40587 - DNA, 19 bp, Artificial Sequence
  Synthetic: FXN 3 reverse 9:69043814-69043836; SpCas9
gggtggatcacctgaggtc

SEQ ID NO: 40588 - DNA, 18 bp, Artificial Sequence
  Synthetic: FXN 3 reverse 9:69043815-69043836; SpCas9
ggtggatcacctgaggtc

SEQ ID NO: 40589 - DNA, 25 bp, Artificial Sequence
  Synthetic: FXN 3 reverse 9:69043809-69043837; SpCas9
cggaggcgggtggatcacctgaggt

SEQ ID NO: 40590 - DNA, 24 bp, Artificial Sequence
  Synthetic: FXN 3 reverse 9:69043810-69043837; SpCas9
ggaggcgggtggatcacctgaggt

SEQ ID NO: 40591 - DNA, 23 bp, Artificial Sequence
  Synthetic: FXN 3 reverse 9:69043811-69043837; SpCas9
gaggcgggtggatcacctgaggt

SEQ ID NO: 40592 - DNA, 22 bp, Artificial Sequence
  Synthetic: FXN 3 reverse 9:69043812-69043837; SpCas9
aggcgggtggatcacctgaggt

SEQ ID NO: 40593 - DNA, 21 bp, Artificial Sequence
  Synthetic: FXN 3 reverse 9:69043813-69043837; SpCas9
ggcgggtggatcacctgaggt

SEQ ID NO: 40594 - DNA, 20 bp, Artificial Sequence
  Synthetic: FXN 3 reverse 9:69043814-69043837; SpCas9
gcgggtggatcacctgaggt

SEQ ID NO: 40595 - DNA, 19 bp, Artificial Sequence
  Synthetic: FXN 3 reverse 9:69043815-69043837; SpCas9
cgggtggatcacctgaggt

SEQ ID NO: 40596 - DNA, 18 bp, Artificial Sequence
  Synthetic: FXN 3 reverse 9:69043816-69043837; SpCas9
gggtggatcacctgaggt

SEQ ID NO: 40597 - DNA, 25 bp, Artificial Sequence
  Synthetic: FXN 3 reverse 9:69043813-69043841; SpCas9
gaggcggaggcgggtggatcacctg

SEQ ID NO: 40598 - DNA, 24 bp, Artificial Sequence
  Synthetic: FXN 3 reverse 9:69043814-69043841; SpCas9
aggcggaggcgggtggatcacctg

SEQ ID NO: 40599 - DNA, 23 bp, Artificial Sequence
  Synthetic: FXN 3 reverse 9:69043815-69043841; SpCas9
ggcggaggcgggtggatcacctg

SEQ ID NO: 40600 - DNA, 22 bp, Artificial Sequence
  Synthetic: FXN 3 reverse 9:69043816-69043841; SpCas9
gcggaggcgggtggatcacctg

SEQ ID NO: 40601 - DNA, 21 bp, Artificial Sequence
  Synthetic: FXN 3 reverse 9:69043817-69043841; SpCas9
cggaggcgggtggatcacctg

SEQ ID NO: 40602 - DNA, 20 bp, Artificial Sequence
  Synthetic: FXN 3 reverse 9:69043818-69043841; SpCas9
ggaggcgggtggatcacctg

SEQ ID NO: 40603 - DNA, 19 bp, Artificial Sequence
  Synthetic: FXN 3 reverse 9:69043819-69043841; SpCas9
gaggcgggtggatcacctg

SEQ ID NO: 40604 - DNA, 18 bp, Artificial Sequence
  Synthetic: FXN 3 reverse 9:69043820-69043841; SpCas9
aggcgggtggatcacctg

SEQ ID NO: 40605 - DNA, 25 bp, Artificial Sequence
  Synthetic: FXN 3 reverse 9:69043814-69043842; SpCas9
ggaggcggaggcgggtggatcacct

SEQ ID NO: 40606 - DNA, 24 bp, Artificial Sequence
  Synthetic: FXN 3 reverse 9:69043815-69043842; SpCas9
gaggcggaggcgggtggatcacct

SEQ ID NO: 40607 - DNA, 23 bp, Artificial Sequence
  Synthetic: FXN 3 reverse 9:69043816-69043842; SpCas9
aggcggaggcgggtggatcacct

SEQ ID NO: 40608 - DNA, 22 bp, Artificial Sequence
  Synthetic: FXN 3 reverse 9:69043817-69043842; SpCas9
ggcggaggcgggtggatcacct

SEQ ID NO: 40609 - DNA, 21 bp, Artificial Sequence
  Synthetic: FXN 3 reverse 9:69043818-69043842; SpCas9
gcggaggcgggtggatcacct

SEQ ID NO: 40610 - DNA, 20 bp, Artificial Sequence
  Synthetic: FXN 3 reverse 9:69043819-69043842; SpCas9
cggaggcgggtggatcacct

SEQ ID NO: 40611 - DNA, 19 bp, Artificial Sequence
  Synthetic: FXN 3 reverse 9:69043820-69043842; SpCas9
ggaggcgggtggatcacct

SEQ ID NO: 40612 - DNA, 18 bp, Artificial Sequence
  Synthetic: FXN 3 reverse 9:69043821-69043842; SpCas9
gaggcgggtggatcacct

SEQ ID NO: 40613 - DNA, 25 bp, Artificial Sequence
  Synthetic: FXN 3 forward 9:69043824-69043852; SpCas9
ccacccgcctccgcctcccaaactg

SEQ ID NO: 40614 - DNA, 24 bp, Artificial Sequence
  Synthetic: FXN 3 forward 9:69043825-69043852; SpCas9
cacccgcctccgcctcccaaactg

SEQ ID NO: 40615 - DNA, 23 bp, Artificial Sequence
  Synthetic: FXN 3 forward 9:69043826-69043852; SpCas9
acccgcctccgcctcccaaactg

SEQ ID NO: 40616 - DNA, 22 bp, Artificial Sequence
  Synthetic: FXN 3 forward 9:69043827-69043852; SpCas9
cccgcctccgcctcccaaactg

SEQ ID NO: 40617 - DNA, 21 bp, Artificial Sequence
  Synthetic: FXN 3 forward 9:69043828-69043852; SpCas9
ccgcctccgcctcccaaactg

SEQ ID NO: 40618 - DNA, 20 bp, Artificial Sequence
  Synthetic: FXN 3 forward 9:69043829-69043852; SpCas9
cgcctccgcctcccaaactg

SEQ ID NO: 40619 - DNA, 19 bp, Artificial Sequence
  Synthetic: FXN 3 forward 9:69043830-69043852; SpCas9
gcctccgcctcccaaactg

SEQ ID NO: 40620 - DNA, 18 bp, Artificial Sequence
  Synthetic: FXN 3 forward 9:69043831-69043852; SpCas9
cctccgcctcccaaactg

SEQ ID NO: 40621 - DNA, 25 bp, Artificial Sequence
  Synthetic: FXN 3 reverse 9:69043824-69043852; SpCas9
ctgcagtttgggaggcggaggcggg

SEQ ID NO: 40622 - DNA, 24 bp, Artificial Sequence
  Synthetic: FXN 3 reverse 9:69043825-69043852; SpCas9
tgcagtttgggaggcggaggcggg

SEQ ID NO: 40623 - DNA, 23 bp, Artificial Sequence
  Synthetic: FXN 3 reverse 9:69043826-69043852; SpCas9
gcagtttgggaggcggaggcggg

SEQ ID NO: 40624 - DNA, 22 bp, Artificial Sequence
  Synthetic: FXN 3 reverse 9:69043827-69043852; SpCas9
cagtttgggaggcggaggcggg

SEQ ID NO: 40625 - DNA, 21 bp, Artificial Sequence
  Synthetic: FXN 3 reverse 9:69043828-69043852; SpCas9
agtttgggaggcggaggcggg

SEQ ID NO: 40626 - DNA, 20 bp, Artificial Sequence
  Synthetic: FXN 3 reverse 9:69043829-69043852; SpCas9
gtttgggaggcggaggcggg

SEQ ID NO: 40627 - DNA, 19 bp, Artificial Sequence
  Synthetic: FXN 3 reverse 9:69043830-69043852; SpCas9
tttgggaggcggaggcggg

SEQ ID NO: 40628 - DNA, 18 bp, Artificial Sequence
  Synthetic: FXN 3 reverse 9:69043831-69043852; SpCas9
ttgggaggcggaggcggg

SEQ ID NO: 40629 - DNA, 25 bp, Artificial Sequence
  Synthetic: FXN 3 forward 9:69043826-69043854; SpCas9
acccgcctccgcctcccaaactgca

SEQ ID NO: 40630 - DNA, 24 bp, Artificial Sequence
  Synthetic: FXN 3 forward 9:69043827-69043854; SpCas9
cccgcctccgcctcccaaactgca

SEQ ID NO: 40631 - DNA, 23 bp, Artificial Sequence
  Synthetic: FXN 3 forward 9:69043828-69043854; SpCas9
ccgcctccgcctcccaaactgca

SEQ ID NO: 40632 - DNA, 22 bp, Artificial Sequence
  Synthetic: FXN 3 forward 9:69043829-69043854; SpCas9
cgcctccgcctcccaaactgca

SEQ ID NO: 40633 - DNA, 21 bp, Artificial Sequence
  Synthetic: FXN 3 forward 9:69043830-69043854; SpCas9
gcctccgcctcccaaactgca

SEQ ID NO: 40634 - DNA, 20 bp, Artificial Sequence
  Synthetic: FXN 3 forward 9:69043831-69043854; SpCas9
cctccgcctcccaaactgca

SEQ ID NO: 40635 - DNA, 19 bp, Artificial Sequence
  Synthetic: FXN 3 forward 9:69043832-69043854; SpCas9
ctccgcctcccaaactgca

SEQ ID NO: 40636 - DNA, 18 bp, Artificial Sequence
  Synthetic: FXN 3 forward 9:69043833-69043854; SpCas9
tccgcctcccaaactgca

SEQ ID NO: 40637 - DNA, 25 bp, Artificial Sequence
  Synthetic: FXN 3 reverse 9:69043827-69043855; SpCas9
tctctgcagtttgggaggcggaggc

SEQ ID NO: 40638 - DNA, 24 bp, Artificial Sequence
  Synthetic: FXN 3 reverse 9:69043828-69043855; SpCas9
ctctgcagtttgggaggcggaggc

SEQ ID NO: 40639 - DNA, 23 bp, Artificial Sequence
  Synthetic: FXN 3 reverse 9:69043829-69043855; SpCas9
tctgcagtttgggaggcggaggc

SEQ ID NO: 40640 - DNA, 22 bp, Artificial Sequence
  Synthetic: FXN 3 reverse 9:69043830-69043855; SpCas9
ctgcagtttgggaggcggaggc

SEQ ID NO: 40641 - DNA, 21 bp, Artificial Sequence
  Synthetic: FXN 3 reverse 9:69043831-69043855; SpCas9
tgcagtttgggaggcggaggc

SEQ ID NO: 40642 - DNA, 20 bp, Artificial Sequence
  Synthetic: FXN 3 reverse 9:69043832-69043855; SpCas9
gcagtttgggaggcggaggc

SEQ ID NO: 40643 - DNA, 19 bp, Artificial Sequence
  Synthetic: FXN 3 reverse 9:69043833-69043855; SpCas9
cagtttgggaggcggaggc

SEQ ID NO: 40644 - DNA, 18 bp, Artificial Sequence
  Synthetic: FXN 3 reverse 9:69043834-69043855; SpCas9
agtttgggaggcggaggc

SEQ ID NO: 40645 - DNA, 25 bp, Artificial Sequence
  Synthetic: FXN 3 reverse 9:69043828-69043856; SpCas9
atctctgcagtttgggaggcggagg

SEQ ID NO: 40646 - DNA, 24 bp, Artificial Sequence
  Synthetic: FXN 3 reverse 9:69043829-69043856; SpCas9
tctctgcagtttgggaggcggagg

SEQ ID NO: 40647 - DNA, 23 bp, Artificial Sequence
  Synthetic: FXN 3 reverse 9:69043830-69043856; SpCas9
ctctgcagtttgggaggcggagg

SEQ ID NO: 40648 - DNA, 22 bp, Artificial Sequence
  Synthetic: FXN 3 reverse 9:69043831-69043856; SpCas9
tctgcagtttgggaggcggagg

SEQ ID NO: 40649 - DNA, 21 bp, Artificial Sequence
  Synthetic: FXN 3 reverse 9:69043832-69043856; SpCas9
ctgcagtttgggaggcggagg

SEQ ID NO: 40650 - DNA, 20 bp, Artificial Sequence
  Synthetic: FXN 3 reverse 9:69043833-69043856; SpCas9
tgcagtttgggaggcggagg

SEQ ID NO: 40651 - DNA, 19 bp, Artificial Sequence
  Synthetic: FXN 3 reverse 9:69043834-69043856; SpCas9
gcagtttgggaggcggagg

SEQ ID NO: 40652 - DNA, 18 bp, Artificial Sequence
  Synthetic: FXN 3 reverse 9:69043835-69043856; SpCas9
cagtttgggaggcggagg

SEQ ID NO: 40653 - DNA, 25 bp, Artificial Sequence
  Synthetic: FXN 3 reverse 9:69043831-69043859; SpCas9
ataatctctgcagtttgggaggcgg

SEQ ID NO: 40654 - DNA, 24 bp, Artificial Sequence
  Synthetic: FXN 3 reverse 9:69043832-69043859; SpCas9
taatctctgcagtttgggaggcgg

SEQ ID NO: 40655 - DNA, 23 bp, Artificial Sequence
  Synthetic: FXN 3 reverse 9:69043833-69043859; SpCas9
aatctctgcagtttgggaggcgg

SEQ ID NO: 40656 - DNA, 22 bp, Artificial Sequence
  Synthetic: FXN 3 reverse 9:69043834-69043859; SpCas9
atctctgcagtttgggaggcgg

SEQ ID NO: 40657 - DNA, 21 bp, Artificial Sequence
  Synthetic: FXN 3 reverse 9:69043835-69043859; SpCas9
tctctgcagtttgggaggcgg

SEQ ID NO: 40658 - DNA, 20 bp, Artificial Sequence
  Synthetic: FXN 3 reverse 9:69043836-69043859; SpCas9
ctctgcagtttgggaggcgg

SEQ ID NO: 40659 - DNA, 19 bp, Artificial Sequence
  Synthetic: FXN 3 reverse 9:69043837-69043859; SpCas9
tctgcagtttgggaggcgg

SEQ ID NO: 40660 - DNA, 18 bp, Artificial Sequence
  Synthetic: FXN 3 reverse 9:69043838-69043859; SpCas9
ctgcagtttgggaggcgg

SEQ ID NO: 40661 - DNA, 25 bp, Artificial Sequence
  Synthetic: FXN 3 reverse 9:69043832-69043860; SpCas9
tataatctctgcagtttgggaggcg

SEQ ID NO: 40662 - DNA, 24 bp, Artificial Sequence
  Synthetic: FXN 3 reverse 9:69043833-69043860; SpCas9
ataatctctgcagtttgggaggcg

SEQ ID NO: 40663 - DNA, 23 bp, Artificial Sequence
  Synthetic: FXN 3 reverse 9:69043834-69043860; SpCas9
taatctctgcagtttgggaggcg

SEQ ID NO: 40664 - DNA, 22 bp, Artificial Sequence
  Synthetic: FXN 3 reverse 9:69043835-69043860; SpCas9
aatctctgcagtttgggaggcg

SEQ ID NO: 40665 - DNA, 21 bp, Artificial Sequence
  Synthetic: FXN 3 reverse 9:69043836-69043860; SpCas9
atctctgcagtttgggaggcg

SEQ ID NO: 40666 - DNA, 20 bp, Artificial Sequence
  Synthetic: FXN 3 reverse 9:69043837-69043860; SpCas9
tctctgcagtttgggaggcg

SEQ ID NO: 40667 - DNA, 19 bp, Artificial Sequence
  Synthetic: FXN 3 reverse 9:69043838-69043860; SpCas9
ctctgcagtttgggaggcg

SEQ ID NO: 40668 - DNA, 18 bp, Artificial Sequence
  Synthetic: FXN 3 reverse 9:69043839-69043860; SpCas9
tctgcagtttgggaggcg

SEQ ID NO: 40669 - DNA, 25 bp, Artificial Sequence
  Synthetic: FXN 3 forward 9:69043833-69043861; SpCas9
tccgcctcccaaactgcagagatta

SEQ ID NO: 40670 - DNA, 24 bp, Artificial Sequence
  Synthetic: FXN 3 forward 9:69043834-69043861; SpCas9
ccgcctcccaaactgcagagatta

SEQ ID NO: 40671 - DNA, 23 bp, Artificial Sequence
  Synthetic: FXN 3 forward 9:69043835-69043861; SpCas9
cgcctcccaaactgcagagatta

SEQ ID NO: 40672 - DNA, 22 bp, Artificial Sequence
  Synthetic: FXN 3 forward 9:69043836-69043861; SpCas9
gcctcccaaactgcagagatta

SEQ ID NO: 40673 - DNA, 21 bp, Artificial Sequence
  Synthetic: FXN 3 forward 9:69043837-69043861; SpCas9
cctcccaaactgcagagatta

SEQ ID NO: 40674 - DNA, 20 bp, Artificial Sequence
  Synthetic: FXN 3 forward 9:69043838-69043861; SpCas9
ctcccaaactgcagagatta

SEQ ID NO: 40675 - DNA, 19 bp, Artificial Sequence
  Synthetic: FXN 3 forward 9:69043839-69043861; SpCas9
tcccaaactgcagagatta

SEQ ID NO: 40676 - DNA, 18 bp, Artificial Sequence
  Synthetic: FXN 3 forward 9:69043840-69043861; SpCas9
cccaaactgcagagatta

SEQ ID NO: 40677 - DNA, 25 bp, Artificial Sequence
  Synthetic: FXN 3 forward 9:69043834-69043862; SpCas9
ccgcctcccaaactgcagagattat

SEQ ID NO: 40678 - DNA, 24 bp, Artificial Sequence
  Synthetic: FXN 3 forward 9:69043835-69043862; SpCas9
cgcctcccaaactgcagagattat

SEQ ID NO: 40679 - DNA, 23 bp, Artificial Sequence
  Synthetic: FXN 3 forward 9:69043836-69043862; SpCas9
gcctcccaaactgcagagattat

SEQ ID NO: 40680 - DNA, 22 bp, Artificial Sequence
  Synthetic: FXN 3 forward 9:69043837-69043862; SpCas9
cctcccaaactgcagagattat

SEQ ID NO: 40681 - DNA, 21 bp, Artificial Sequence
  Synthetic: FXN 3 forward 9:69043838-69043862; SpCas9
ctcccaaactgcagagattat

SEQ ID NO: 40682 - DNA, 20 bp, Artificial Sequence
  Synthetic: FXN 3 forward 9:69043839-69043862; SpCas9
tcccaaactgcagagattat

SEQ ID NO: 40683 - DNA, 19 bp, Artificial Sequence
  Synthetic: FXN 3 forward 9:69043840-69043862; SpCas9
cccaaactgcagagattat

SEQ ID NO: 40684 - DNA, 18 bp, Artificial Sequence
  Synthetic: FXN 3 forward 9:69043841-69043862; SpCas9
ccaaactgcagagattat

SEQ ID NO: 40685 - DNA, 25 bp, Artificial Sequence
  Synthetic: FXN 3 reverse 9:69043834-69043862; SpCas9
cctataatctctgcagtttgggagg

SEQ ID NO: 40686 - DNA, 24 bp, Artificial Sequence
  Synthetic: FXN 3 reverse 9:69043835-69043862; SpCas9
ctataatctctgcagtttgggagg

SEQ ID NO: 40687 - DNA, 23 bp, Artificial Sequence
  Synthetic: FXN 3 reverse 9:69043836-69043862; SpCas9
tataatctctgcagtttgggagg

SEQ ID NO: 40688 - DNA, 22 bp, Artificial Sequence
  Synthetic: FXN 3 reverse 9:69043837-69043862; SpCas9
ataatctctgcagtttgggagg

SEQ ID NO: 40689 - DNA, 21 bp, Artificial Sequence
  Synthetic: FXN 3 reverse 9:69043838-69043862; SpCas9
taatctctgcagtttgggagg

SEQ ID NO: 40690 - DNA, 20 bp, Artificial Sequence
  Synthetic: FXN 3 reverse 9:69043839-69043862; SpCas9
aatctctgcagtttgggagg

SEQ ID NO: 40691 - DNA, 19 bp, Artificial Sequence
  Synthetic: FXN 3 reverse 9:69043840-69043862; SpCas9
atctctgcagtttgggagg

SEQ ID NO: 40692 - DNA, 18 bp, Artificial Sequence
  Synthetic: FXN 3 reverse 9:69043841-69043862; SpCas9
tctctgcagtttgggagg

SEQ ID NO: 40693 - DNA, 25 bp, Artificial Sequence
  Synthetic: FXN 3 reverse 9:69043837-69043865; SpCas9
gtgcctataatctctgcagtttggg

SEQ ID NO: 40694 - DNA, 24 bp, Artificial Sequence
  Synthetic: FXN 3 reverse 9:69043838-69043865; SpCas9
tgcctataatctctgcagtttggg

SEQ ID NO: 40695 - DNA, 23 bp, Artificial Sequence
  Synthetic: FXN 3 reverse 9:69043839-69043865; SpCas9
gcctataatctctgcagtttggg

SEQ ID NO: 40696 - DNA, 22 bp, Artificial Sequence
  Synthetic: FXN 3 reverse 9:69043840-69043865; SpCas9
cctataatctctgcagtttggg

SEQ ID NO: 40697 - DNA, 21 bp, Artificial Sequence
  Synthetic: FXN 3 reverse 9:69043841-69043865; SpCas9
ctataatctctgcagtttggg

SEQ ID NO: 40698 - DNA, 20 bp, Artificial Sequence
  Synthetic: FXN 3 reverse 9:69043842-69043865; SpCas9
tataatctctgcagtttggg

SEQ ID NO: 40699 - DNA, 19 bp, Artificial Sequence
  Synthetic: FXN 3 reverse 9:69043843-69043865; SpCas9
ataatctctgcagtttggg

SEQ ID NO: 40700 - DNA, 18 bp, Artificial Sequence
  Synthetic: FXN 3 reverse 9:69043844-69043865; SpCas9
taatctctgcagtttggg

SEQ ID NO: 40701 - DNA, 25 bp, Artificial Sequence
  Synthetic: FXN 3 reverse 9:69043838-69043866; SpCas9
cgtgcctataatctctgcagtttgg

SEQ ID NO: 40702 - DNA, 24 bp, Artificial Sequence
  Synthetic: FXN 3 reverse 9:69043839-69043866; SpCas9
gtgcctataatctctgcagtttgg

SEQ ID NO: 40703 - DNA, 23 bp, Artificial Sequence
  Synthetic: FXN 3 reverse 9:69043840-69043866; SpCas9
tgcctataatctctgcagtttgg

SEQ ID NO: 40704 - DNA, 22 bp, Artificial Sequence
  Synthetic: FXN 3 reverse 9:69043841-69043866; SpCas9
gcctataatctctgcagtttgg

SEQ ID NO: 40705 - DNA, 21 bp, Artificial Sequence
  Synthetic: FXN 3 reverse 9:69043842-69043866; SpCas9
cctataatctctgcagtttgg

SEQ ID NO: 40706 - DNA, 20 bp, Artificial Sequence
  Synthetic: FXN 3 reverse 9:69043843-69043866; SpCas9
ctataatctctgcagtttgg

SEQ ID NO: 40707 - DNA, 19 bp, Artificial Sequence
  Synthetic: FXN 3 reverse 9:69043844-69043866; SpCas9
tataatctctgcagtttgg

SEQ ID NO: 40708 - DNA, 18 bp, Artificial Sequence
  Synthetic: FXN 3 reverse 9:69043845-69043866; SpCas9
ataatctctgcagtttgg

SEQ ID NO: 40709 - DNA, 25 bp, Artificial Sequence
  Synthetic: FXN 3 reverse 9:69043840-69043868; SpCas9
ttcgtgcctataatctctgcagttt

SEQ ID NO: 40710 - DNA, 24 bp, Artificial Sequence
  Synthetic: FXN 3 reverse 9:69043841-69043868; SpCas9
tcgtgcctataatctctgcagttt

SEQ ID NO: 40711 - DNA, 23 bp, Artificial Sequence
  Synthetic: FXN 3 reverse 9:69043842-69043868; SpCas9
cgtgcctataatctctgcagttt

SEQ ID NO: 40712 - DNA, 22 bp, Artificial Sequence
  Synthetic: FXN 3 reverse 9:69043843-69043868; SpCas9
gtgcctataatctctgcagttt

SEQ ID NO: 40713 - DNA, 21 bp, Artificial Sequence
  Synthetic: FXN 3 reverse 9:69043844-69043868; SpCas9
tgcctataatctctgcagttt

SEQ ID NO: 40714 - DNA, 20 bp, Artificial Sequence
  Synthetic: FXN 3 reverse 9:69043845-69043868; SpCas9
gcctataatctctgcagttt

SEQ ID NO: 40715 - DNA, 19 bp, Artificial Sequence
  Synthetic: FXN 3 reverse 9:69043846-69043868; SpCas9
cctataatctctgcagttt

SEQ ID NO: 40716 - DNA, 18 bp, Artificial Sequence
  Synthetic: FXN 3 reverse 9:69043847-69043868; SpCas9
ctataatctctgcagttt

SEQ ID NO: 40717 - DNA, 25 bp, Artificial Sequence
  Synthetic: FXN 3 reverse 9:69043841-69043869; SpCas9
gttcgtgcctataatctctgcagtt

SEQ ID NO: 40718 - DNA, 24 bp, Artificial Sequence
  Synthetic: FXN 3 reverse 9:69043842-69043869; SpCas9
ttcgtgcctataatctctgcagtt

SEQ ID NO: 40719 - DNA, 23 bp, Artificial Sequence
  Synthetic: FXN 3 reverse 9:69043843-69043869; SpCas9
tcgtgcctataatctctgcagtt

SEQ ID NO: 40720 - DNA, 22 bp, Artificial Sequence
  Synthetic: FXN 3 reverse 9:69043844-69043869; SpCas9
cgtgcctataatctctgcagtt

SEQ ID NO: 40721 - DNA, 21 bp, Artificial Sequence
  Synthetic: FXN 3 reverse 9:69043845-69043869; SpCas9
gtgcctataatctctgcagtt

SEQ ID NO: 40722 - DNA, 20 bp, Artificial Sequence
  Synthetic: FXN 3 reverse 9:69043846-69043869; SpCas9
tgcctataatctctgcagtt

SEQ ID NO: 40723 - DNA, 19 bp, Artificial Sequence
  Synthetic: FXN 3 reverse 9:69043847-69043869; SpCas9
gcctataatctctgcagtt

SEQ ID NO: 40724 - DNA, 18 bp, Artificial Sequence
  Synthetic: FXN 3 reverse 9:69043848-69043869; SpCas9
cctataatctctgcagtt

SEQ ID NO: 40725 - DNA, 25 bp, Artificial Sequence
  Synthetic: FXN 3 reverse 9:69043846-69043874; SpCas9
ttgtggttcgtgcctataatctctg

SEQ ID NO: 40726 - DNA, 24 bp, Artificial Sequence
  Synthetic: FXN 3 reverse 9:69043847-69043874; SpCas9
tgtggttcgtgcctataatctctg

SEQ ID NO: 40727 - DNA, 23 bp, Artificial Sequence
  Synthetic: FXN 3 reverse 9:69043848-69043874; SpCas9
gtggttcgtgcctataatctctg

SEQ ID NO: 40728 - DNA, 22 bp, Artificial Sequence
  Synthetic: FXN 3 reverse 9:69043849-69043874; SpCas9
tggttcgtgcctataatctctg

SEQ ID NO: 40729 - DNA, 21 bp, Artificial Sequence
  Synthetic: FXN 3 reverse 9:69043850-69043874; SpCas9
ggttcgtgcctataatctctg

SEQ ID NO: 40730 - DNA, 20 bp, Artificial Sequence
  Synthetic: FXN 3 reverse 9:69043851-69043874; SpCas9
gttcgtgcctataatctctg

SEQ ID NO: 40731 - DNA, 19 bp, Artificial Sequence
  Synthetic: FXN 3 reverse 9:69043852-69043874; SpCas9
ttcgtgcctataatctctg

SEQ ID NO: 40732 - DNA, 18 bp, Artificial Sequence
  Synthetic: FXN 3 reverse 9:69043853-69043874; SpCas9
tcgtgcctataatctctg

SEQ ID NO: 40733 - DNA, 25 bp, Artificial Sequence
  Synthetic: FXN 3 forward 9:69043853-69043881; SpCas9
gattataggcacgaaccacaatgcc

SEQ ID NO: 40734 - DNA, 24 bp, Artificial Sequence
  Synthetic: FXN 3 forward 9:69043854-69043881; SpCas9
attataggcacgaaccacaatgcc

SEQ ID NO: 40735 - DNA, 23 bp, Artificial Sequence
  Synthetic: FXN 3 forward 9:69043855-69043881; SpCas9
ttataggcacgaaccacaatgcc

SEQ ID NO: 40736 - DNA, 22 bp, Artificial Sequence
  Synthetic: FXN 3 forward 9:69043856-69043881; SpCas9
tataggcacgaaccacaatgcc

SEQ ID NO: 40737 - DNA, 21 bp, Artificial Sequence
  Synthetic: FXN 3 forward 9:69043857-69043881; SpCas9
ataggcacgaaccacaatgcc

SEQ ID NO: 40738 - DNA, 20 bp, Artificial Sequence
  Synthetic: FXN 3 forward 9:69043858-69043881; SpCas9
taggcacgaaccacaatgcc

SEQ ID NO: 40739 - DNA, 19 bp, Artificial Sequence
  Synthetic: FXN 3 forward 9:69043859-69043881; SpCas9
aggcacgaaccacaatgcc

SEQ ID NO: 40740 - DNA, 18 bp, Artificial Sequence
  Synthetic: FXN 3 forward 9:69043860-69043881; SpCas9
ggcacgaaccacaatgcc

SEQ ID NO: 40741 - DNA, 25 bp, Artificial Sequence
  Synthetic: FXN 3 reverse 9:69043868-69043896; SpCas9
ataaaaaacatgaggccgggcattg

SEQ ID NO: 40742 - DNA, 24 bp, Artificial Sequence
  Synthetic: FXN 3 reverse 9:69043869-69043896; SpCas9
taaaaaacatgaggccgggcattg

SEQ ID NO: 40743 - DNA, 23 bp, Artificial Sequence
  Synthetic: FXN 3 reverse 9:69043870-69043896; SpCas9
aaaaaacatgaggccgggcattg

SEQ ID NO: 40744 - DNA, 22 bp, Artificial Sequence
  Synthetic: FXN 3 reverse 9:69043871-69043896; SpCas9
aaaaacatgaggccgggcattg

SEQ ID NO: 40745 - DNA, 21 bp, Artificial Sequence
  Synthetic: FXN 3 reverse 9:69043872-69043896; SpCas9
aaaacatgaggccgggcattg

SEQ ID NO: 40746 - DNA, 20 bp, Artificial Sequence
  Synthetic: FXN 3 reverse 9:69043873-69043896; SpCas9
aaacatgaggccgggcattg

SEQ ID NO: 40747 - DNA, 19 bp, Artificial Sequence
  Synthetic: FXN 3 reverse 9:69043874-69043896; SpCas9
aacatgaggccgggcattg

SEQ ID NO: 40748 - DNA, 18 bp, Artificial Sequence
  Synthetic: FXN 3 reverse 9:69043875-69043896; SpCas9
acatgaggccgggcattg

SEQ ID NO: 40749 - DNA, 25 bp, Artificial Sequence
  Synthetic: FXN 3 forward 9:69043876-69043904; SpCas9
cccggcctcatgttttttatttttc

SEQ ID NO: 40750 - DNA, 24 bp, Artificial Sequence
  Synthetic: FXN 3 forward 9:69043877-69043904; SpCas9
ccggcctcatgttttttatttttc

SEQ ID NO: 40751 - DNA, 23 bp, Artificial Sequence
  Synthetic: FXN 3 forward 9:69043878-69043904; SpCas9
cggcctcatgttttttatttttc

SEQ ID NO: 40752 - DNA, 22 bp, Artificial Sequence
  Synthetic: FXN 3 forward 9:69043879-69043904; SpCas9
ggcctcatgttttttatttttc

SEQ ID NO: 40753 - DNA, 21 bp, Artificial Sequence
  Synthetic: FXN 3 forward 9:69043880-69043904; SpCas9
gcctcatgttttttatttttc

SEQ ID NO: 40754 - DNA, 20 bp, Artificial Sequence
  Synthetic: FXN 3 forward 9:69043881-69043904; SpCas9
cctcatgttttttatttttc

SEQ ID NO: 40755 - DNA, 19 bp, Artificial Sequence
  Synthetic: FXN 3 forward 9:69043882-69043904; SpCas9
ctcatgttttttatttttc

SEQ ID NO: 40756 - DNA, 18 bp, Artificial Sequence
  Synthetic: FXN 3 forward 9:69043883-69043904; SpCas9
tcatgttttttatttttc

SEQ ID NO: 40757 - DNA, 25 bp, Artificial Sequence
  Synthetic: FXN 3 reverse 9:69043876-69043904; SpCas9
cttgaaaaataaaaaacatgaggcc

SEQ ID NO: 40758 - DNA, 24 bp, Artificial Sequence
  Synthetic: FXN 3 reverse 9:69043877-69043904; SpCas9
ttgaaaaataaaaaacatgaggcc

SEQ ID NO: 40759 - DNA, 23 bp, Artificial Sequence
  Synthetic: FXN 3 reverse 9:69043878-69043904; SpCas9
tgaaaaataaaaaacatgaggcc

SEQ ID NO: 40760 - DNA, 22 bp, Artificial Sequence
  Synthetic: FXN 3 reverse 9:69043879-69043904; SpCas9
gaaaaataaaaaacatgaggcc

SEQ ID NO: 40761 - DNA, 21 bp, Artificial Sequence
  Synthetic: FXN 3 reverse 9:69043880-69043904; SpCas9
aaaaataaaaaacatgaggcc

SEQ ID NO: 40762 - DNA, 20 bp, Artificial Sequence
  Synthetic: FXN 3 reverse 9:69043881-69043904; SpCas9
aaaataaaaaacatgaggcc

SEQ ID NO: 40763 - DNA, 19 bp, Artificial Sequence
  Synthetic: FXN 3 reverse 9:69043882-69043904; SpCas9
aaataaaaaacatgaggcc

SEQ ID NO: 40764 - DNA, 18 bp, Artificial Sequence
  Synthetic: FXN 3 reverse 9:69043883-69043904; SpCas9
aataaaaaacatgaggcc

SEQ ID NO: 40765 - DNA, 25 bp, Artificial Sequence
  Synthetic: FXN 3 reverse 9:69043877-69043905; SpCas9
acttgaaaaataaaaaacatgaggc

SEQ ID NO: 40766 - DNA, 24 bp, Artificial Sequence
  Synthetic: FXN 3 reverse 9:69043878-69043905; SpCas9
cttgaaaaataaaaaacatgaggc

SEQ ID NO: 40767 - DNA, 23 bp, Artificial Sequence
  Synthetic: FXN 3 reverse 9:69043879-69043905; SpCas9
ttgaaaaataaaaaacatgaggc

SEQ ID NO: 40768 - DNA, 22 bp, Artificial Sequence
  Synthetic: FXN 3 reverse 9:69043880-69043905; SpCas9
tgaaaaataaaaaacatgaggc

SEQ ID NO: 40769 - DNA, 21 bp, Artificial Sequence
  Synthetic: FXN 3 reverse 9:69043881-69043905; SpCas9
gaaaaataaaaaacatgaggc

SEQ ID NO: 40770 - DNA, 20 bp, Artificial Sequence
  Synthetic: FXN 3 reverse 9:69043882-69043905; SpCas9
aaaaataaaaaacatgaggc

SEQ ID NO: 40771 - DNA, 19 bp, Artificial Sequence
  Synthetic: FXN 3 reverse 9:69043883-69043905; SpCas9
aaaataaaaaacatgaggc

SEQ ID NO: 40772 - DNA, 18 bp, Artificial Sequence
  Synthetic: FXN 3 reverse 9:69043884-69043905; SpCas9
aaataaaaaacatgaggc

SEQ ID NO: 40773 - DNA, 25 bp, Artificial Sequence
  Synthetic: FXN 3 reverse 9:69043881-69043909; SpCas9
ttcaacttgaaaaataaaaaacatg

SEQ ID NO: 40774 - DNA, 24 bp, Artificial Sequence
  Synthetic: FXN 3 reverse 9:69043882-69043909; SpCas9
tcaacttgaaaaataaaaaacatg

SEQ ID NO: 40775 - DNA, 23 bp, Artificial Sequence
  Synthetic: FXN 3 reverse 9:69043883-69043909; SpCas9
caacttgaaaaataaaaaacatg

SEQ ID NO: 40776 - DNA, 22 bp, Artificial Sequence
  Synthetic: FXN 3 reverse 9:69043884-69043909; SpCas9
aacttgaaaaataaaaaacatg

SEQ ID NO: 40777 - DNA, 21 bp, Artificial Sequence
  Synthetic: FXN 3 reverse 9:69043885-69043909; SpCas9
acttgaaaaataaaaaacatg

SEQ ID NO: 40778 - DNA, 20 bp, Artificial Sequence
  Synthetic: FXN 3 reverse 9:69043886-69043909; SpCas9
cttgaaaaataaaaaacatg

SEQ ID NO: 40779 - DNA, 19 bp, Artificial Sequence
  Synthetic: FXN 3 reverse 9:69043887-69043909; SpCas9
ttgaaaaataaaaaacatg

SEQ ID NO: 40780 - DNA, 18 bp, Artificial Sequence
  Synthetic: FXN 3 reverse 9:69043888-69043909; SpCas9
tgaaaaataaaaaacatg

SEQ ID NO: 40781 - DNA, 25 bp, Artificial Sequence
  Synthetic: FXN 3 reverse 9:69043882-69043910; SpCas9
tttcaacttgaaaaataaaaaacat

SEQ ID NO: 40782 - DNA, 24 bp, Artificial Sequence
  Synthetic: FXN 3 reverse 9:69043883-69043910; SpCas9
ttcaacttgaaaaataaaaaacat

SEQ ID NO: 40783 - DNA, 23 bp, Artificial Sequence
  Synthetic: FXN 3 reverse 9:69043884-69043910; SpCas9
tcaacttgaaaaataaaaaacat

SEQ ID NO: 40784 - DNA, 22 bp, Artificial Sequence
  Synthetic: FXN 3 reverse 9:69043885-69043910; SpCas9
caacttgaaaaataaaaaacat

SEQ ID NO: 40785 - DNA, 21 bp, Artificial Sequence
  Synthetic: FXN 3 reverse 9:69043886-69043910; SpCas9
aacttgaaaaataaaaaacat

SEQ ID NO: 40786 - DNA, 20 bp, Artificial Sequence
  Synthetic: FXN 3 reverse 9:69043887-69043910; SpCas9
acttgaaaaataaaaaacat

SEQ ID NO: 40787 - DNA, 19 bp, Artificial Sequence
  Synthetic: FXN 3 reverse 9:69043888-69043910; SpCas9
cttgaaaaataaaaaacat

SEQ ID NO: 40788 - DNA, 18 bp, Artificial Sequence
  Synthetic: FXN 3 reverse 9:69043889-69043910; SpCas9
ttgaaaaataaaaaacat

SEQ ID NO: 40789 - DNA, 25 bp, Artificial Sequence
  Synthetic: FXN 3 forward 9:69043886-69043914; SpCas9
tgttttttatttttcaagttgaaat

SEQ ID NO: 40790 - DNA, 24 bp, Artificial Sequence
  Synthetic: FXN 3 forward 9:69043887-69043914; SpCas9
gttttttatttttcaagttgaaat

SEQ ID NO: 40791 - DNA, 23 bp, Artificial Sequence
  Synthetic: FXN 3 forward 9:69043888-69043914; SpCas9
ttttttatttttcaagttgaaat

SEQ ID NO: 40792 - DNA, 22 bp, Artificial Sequence
  Synthetic: FXN 3 forward 9:69043889-69043914; SpCas9
tttttatttttcaagttgaaat

SEQ ID NO: 40793 - DNA, 21 bp, Artificial Sequence
  Synthetic: FXN 3 forward 9:69043890-69043914; SpCas9
ttttatttttcaagttgaaat

SEQ ID NO: 40794 - DNA, 20 bp, Artificial Sequence
  Synthetic: FXN 3 forward 9:69043891-69043914; SpCas9
tttatttttcaagttgaaat

SEQ ID NO: 40795 - DNA, 19 bp, Artificial Sequence
  Synthetic: FXN 3 forward 9:69043892-69043914; SpCas9
ttatttttcaagttgaaat

SEQ ID NO: 40796 - DNA, 18 bp, Artificial Sequence
  Synthetic: FXN 3 forward 9:69043893-69043914; SpCas9
tatttttcaagttgaaat

SEQ ID NO: 40797 - DNA, 25 bp, Artificial Sequence
  Synthetic: FXN 3 forward 9:69043887-69043915; SpCas9
gttttttatttttcaagttgaaatg

SEQ ID NO: 40798 - DNA, 24 bp, Artificial Sequence
  Synthetic: FXN 3 forward 9:69043888-69043915; SpCas9
ttttttatttttcaagttgaaatg

SEQ ID NO: 40799 - DNA, 23 bp, Artificial Sequence
  Synthetic: FXN 3 forward 9:69043889-69043915; SpCas9
tttttatttttcaagttgaaatg

SEQ ID NO: 40800 - DNA, 22 bp, Artificial Sequence
  Synthetic: FXN 3 forward 9:69043890-69043915; SpCas9
ttttatttttcaagttgaaatg

SEQ ID NO: 40801 - DNA, 21 bp, Artificial Sequence
  Synthetic: FXN 3 forward 9:69043891-69043915; SpCas9
tttatttttcaagttgaaatg

SEQ ID NO: 40802 - DNA, 20 bp, Artificial Sequence
  Synthetic: FXN 3 forward 9:69043892-69043915; SpCas9
ttatttttcaagttgaaatg

SEQ ID NO: 40803 - DNA, 19 bp, Artificial Sequence
  Synthetic: FXN 3 forward 9:69043893-69043915; SpCas9
tatttttcaagttgaaatg

SEQ ID NO: 40804 - DNA, 18 bp, Artificial Sequence
  Synthetic: FXN 3 forward 9:69043894-69043915; SpCas9
atttttcaagttgaaatg

SEQ ID NO: 40805 - DNA, 25 bp, Artificial Sequence
  Synthetic: FXN 3 forward 9:69043905-69043933; SpCas9
tgaaatgaggtctctctatgttgcc

SEQ ID NO: 40806 - DNA, 24 bp, Artificial Sequence
  Synthetic: FXN 3 forward 9:69043906-69043933; SpCas9
gaaatgaggtctctctatgttgcc

SEQ ID NO: 40807 - DNA, 23 bp, Artificial Sequence
  Synthetic: FXN 3 forward 9:69043907-69043933; SpCas9
aaatgaggtctctctatgttgcc

SEQ ID NO: 40808 - DNA, 22 bp, Artificial Sequence
  Synthetic: FXN 3 forward 9:69043908-69043933; SpCas9
aatgaggtctctctatgttgcc

SEQ ID NO: 40809 - DNA, 21 bp, Artificial Sequence
  Synthetic: FXN 3 forward 9:69043909-69043933; SpCas9
atgaggtctctctatgttgcc

SEQ ID NO: 40810 - DNA, 20 bp, Artificial Sequence
  Synthetic: FXN 3 forward 9:69043910-69043933; SpCas9
tgaggtctctctatgttgcc

SEQ ID NO: 40811 - DNA, 19 bp, Artificial Sequence
  Synthetic: FXN 3 forward 9:69043911-69043933; SpCas9
gaggtctctctatgttgcc

SEQ ID NO: 40812 - DNA, 18 bp, Artificial Sequence
  Synthetic: FXN 3 forward 9:69043912-69043933; SpCas9
aggtctctctatgttgcc

SEQ ID NO: 40813 - DNA, 25 bp, Artificial Sequence
  Synthetic: FXN 3 forward 9:69043906-69043934; SpCas9
gaaatgaggtctctctatgttgccc

SEQ ID NO: 40814 - DNA, 24 bp, Artificial Sequence
  Synthetic: FXN 3 forward 9:69043907-69043934; SpCas9
aaatgaggtctctctatgttgccc

SEQ ID NO: 40815 - DNA, 23 bp, Artificial Sequence
  Synthetic: FXN 3 forward 9:69043908-69043934; SpCas9
aatgaggtctctctatgttgccc

SEQ ID NO: 40816 - DNA, 22 bp, Artificial Sequence
  Synthetic: FXN 3 forward 9:69043909-69043934; SpCas9
atgaggtctctctatgttgccc

SEQ ID NO: 40817 - DNA, 21 bp, Artificial Sequence
  Synthetic: FXN 3 forward 9:69043910-69043934; SpCas9
tgaggtctctctatgttgccc

SEQ ID NO: 40818 - DNA, 20 bp, Artificial Sequence
  Synthetic: FXN 3 forward 9:69043911-69043934; SpCas9
gaggtctctctatgttgccc

SEQ ID NO: 40819 - DNA, 19 bp, Artificial Sequence
  Synthetic: FXN 3 forward 9:69043912-69043934; SpCas9
aggtctctctatgttgccc

SEQ ID NO: 40820 - DNA, 18 bp, Artificial Sequence
  Synthetic: FXN 3 forward 9:69043913-69043934; SpCas9
ggtctctctatgttgccc

SEQ ID NO: 40821 - DNA, 25 bp, Artificial Sequence
  Synthetic: FXN 3 forward 9:69043910-69043938; SpCas9
tgaggtctctctatgttgcccaggt

SEQ ID NO: 40822 - DNA, 24 bp, Artificial Sequence
  Synthetic: FXN 3 forward 9:69043911-69043938; SpCas9
gaggtctctctatgttgcccaggt

SEQ ID NO: 40823 - DNA, 23 bp, Artificial Sequence
  Synthetic: FXN 3 forward 9:69043912-69043938; SpCas9
aggtctctctatgttgcccaggt

SEQ ID NO: 40824 - DNA, 22 bp, Artificial Sequence
  Synthetic: FXN 3 forward 9:69043913-69043938; SpCas9
ggtctctctatgttgcccaggt

SEQ ID NO: 40825 - DNA, 21 bp, Artificial Sequence
  Synthetic: FXN 3 forward 9:69043914-69043938; SpCas9
gtctctctatgttgcccaggt

SEQ ID NO: 40826 - DNA, 20 bp, Artificial Sequence
  Synthetic: FXN 3 forward 9:69043915-69043938; SpCas9
tctctctatgttgcccaggt

SEQ ID NO: 40827 - DNA, 19 bp, Artificial Sequence
  Synthetic: FXN 3 forward 9:69043916-69043938; SpCas9
ctctctatgttgcccaggt

SEQ ID NO: 40828 - DNA, 18 bp, Artificial Sequence
  Synthetic: FXN 3 forward 9:69043917-69043938; SpCas9
tctctatgttgcccaggt

SEQ ID NO: 40829 - DNA, 25 bp, Artificial Sequence
  Synthetic: FXN 3 reverse 9:69043916-69043944; SpCas9
ttgagaccaacctgggcaacataga

SEQ ID NO: 40830 - DNA, 24 bp, Artificial Sequence
  Synthetic: FXN 3 reverse 9:69043917-69043944; SpCas9
tgagaccaacctgggcaacataga

SEQ ID NO: 40831 - DNA, 23 bp, Artificial Sequence
  Synthetic: FXN 3 reverse 9:69043918-69043944; SpCas9
gagaccaacctgggcaacataga

SEQ ID NO: 40832 - DNA, 22 bp, Artificial Sequence
  Synthetic: FXN 3 reverse 9:69043919-69043944; SpCas9
agaccaacctgggcaacataga

SEQ ID NO: 40833 - DNA, 21 bp, Artificial Sequence
  Synthetic: FXN 3 reverse 9:69043920-69043944; SpCas9
gaccaacctgggcaacataga

SEQ ID NO: 40834 - DNA, 20 bp, Artificial Sequence
  Synthetic: FXN 3 reverse 9:69043921-69043944; SpCas9
accaacctgggcaacataga

SEQ ID NO: 40835 - DNA, 19 bp, Artificial Sequence
  Synthetic: FXN 3 reverse 9:69043922-69043944; SpCas9
ccaacctgggcaacataga

SEQ ID NO: 40836 - DNA, 18 bp, Artificial Sequence
  Synthetic: FXN 3 reverse 9:69043923-69043944; SpCas9
caacctgggcaacataga

SEQ ID NO: 40837 - DNA, 25 bp, Artificial Sequence
  Synthetic: FXN 3 reverse 9:69043918-69043946; SpCas9
gtttgagaccaacctgggcaacata

SEQ ID NO: 40838 - DNA, 24 bp, Artificial Sequence
  Synthetic: FXN 3 reverse 9:69043919-69043946; SpCas9
tttgagaccaacctgggcaacata

SEQ ID NO: 40839 - DNA, 23 bp, Artificial Sequence
  Synthetic: FXN 3 reverse 9:69043920-69043946; SpCas9
ttgagaccaacctgggcaacata

SEQ ID NO: 40840 - DNA, 22 bp, Artificial Sequence
  Synthetic: FXN 3 reverse 9:69043921-69043946; SpCas9
tgagaccaacctgggcaacata

SEQ ID NO: 40841 - DNA, 21 bp, Artificial Sequence
  Synthetic: FXN 3 reverse 9:69043922-69043946; SpCas9
gagaccaacctgggcaacata

SEQ ID NO: 40842 - DNA, 20 bp, Artificial Sequence
  Synthetic: FXN 3 reverse 9:69043923-69043946; SpCas9
agaccaacctgggcaacata

SEQ ID NO: 40843 - DNA, 19 bp, Artificial Sequence
  Synthetic: FXN 3 reverse 9:69043924-69043946; SpCas9
gaccaacctgggcaacata

SEQ ID NO: 40844 - DNA, 18 bp, Artificial Sequence
  Synthetic: FXN 3 reverse 9:69043925-69043946; SpCas9
accaacctgggcaacata

SEQ ID NO: 40845 - DNA, 25 bp, Artificial Sequence
  Synthetic: FXN 3 reverse 9:69043920-69043948; SpCas9
gagtttgagaccaacctgggcaaca

SEQ ID NO: 40846 - DNA, 24 bp, Artificial Sequence
  Synthetic: FXN 3 reverse 9:69043921-69043948; SpCas9
agtttgagaccaacctgggcaaca

SEQ ID NO: 40847 - DNA, 23 bp, Artificial Sequence
  Synthetic: FXN 3 reverse 9:69043922-69043948; SpCas9
gtttgagaccaacctgggcaaca

SEQ ID NO: 40848 - DNA, 22 bp, Artificial Sequence
  Synthetic: FXN 3 reverse 9:69043923-69043948; SpCas9
tttgagaccaacctgggcaaca

SEQ ID NO: 40849 - DNA, 21 bp, Artificial Sequence
  Synthetic: FXN 3 reverse 9:69043924-69043948; SpCas9
ttgagaccaacctgggcaaca

SEQ ID NO: 40850 - DNA, 20 bp, Artificial Sequence
  Synthetic: FXN 3 reverse 9:69043925-69043948; SpCas9
tgagaccaacctgggcaaca

SEQ ID NO: 40851 - DNA, 19 bp, Artificial Sequence
  Synthetic: FXN 3 reverse 9:69043926-69043948; SpCas9
gagaccaacctgggcaaca

SEQ ID NO: 40852 - DNA, 18 bp, Artificial Sequence
  Synthetic: FXN 3 reverse 9:69043927-69043948; SpCas9
agaccaacctgggcaaca

SEQ ID NO: 40853 - DNA, 25 bp, Artificial Sequence
  Synthetic: FXN 3 forward 9:69043925-69043953; SpCas9
ttgcccaggttggtctcaaactctt

SEQ ID NO: 40854 - DNA, 24 bp, Artificial Sequence
  Synthetic: FXN 3 forward 9:69043926-69043953; SpCas9
tgcccaggttggtctcaaactctt

SEQ ID NO: 40855 - DNA, 23 bp, Artificial Sequence
  Synthetic: FXN 3 forward 9:69043927-69043953; SpCas9
gcccaggttggtctcaaactctt

SEQ ID NO: 40856 - DNA, 22 bp, Artificial Sequence
  Synthetic: FXN 3 forward 9:69043928-69043953; SpCas9
cccaggttggtctcaaactctt

SEQ ID NO: 40857 - DNA, 21 bp, Artificial Sequence
  Synthetic: FXN 3 forward 9:69043929-69043953; SpCas9
ccaggttggtctcaaactctt

SEQ ID NO: 40858 - DNA, 20 bp, Artificial Sequence
  Synthetic: FXN 3 forward 9:69043930-69043953; SpCas9
caggttggtctcaaactctt

SEQ ID NO: 40859 - DNA, 19 bp, Artificial Sequence
  Synthetic: FXN 3 forward 9:69043931-69043953; SpCas9
aggttggtctcaaactctt

SEQ ID NO: 40860 - DNA, 18 bp, Artificial Sequence
  Synthetic: FXN 3 forward 9:69043932-69043953; SpCas9
ggttggtctcaaactctt

SEQ ID NO: 40861 - DNA, 25 bp, Artificial Sequence
  Synthetic: FXN 3 reverse 9:69043928-69043956; SpCas9
gagctcaagagtttgagaccaacct

SEQ ID NO: 40862 - DNA, 24 bp, Artificial Sequence
  Synthetic: FXN 3 reverse 9:69043929-69043956; SpCas9
agctcaagagtttgagaccaacct

SEQ ID NO: 40863 - DNA, 23 bp, Artificial Sequence
  Synthetic: FXN 3 reverse 9:69043930-69043956; SpCas9
gctcaagagtttgagaccaacct

SEQ ID NO: 40864 - DNA, 22 bp, Artificial Sequence
  Synthetic: FXN 3 reverse 9:69043931-69043956; SpCas9
ctcaagagtttgagaccaacct

SEQ ID NO: 40865 - DNA, 21 bp, Artificial Sequence
  Synthetic: FXN 3 reverse 9:69043932-69043956; SpCas9
tcaagagtttgagaccaacct

SEQ ID NO: 40866 - DNA, 20 bp, Artificial Sequence
  Synthetic: FXN 3 reverse 9:69043933-69043956; SpCas9
caagagtttgagaccaacct

SEQ ID NO: 40867 - DNA, 19 bp, Artificial Sequence
  Synthetic: FXN 3 reverse 9:69043934-69043956; SpCas9
aagagtttgagaccaacct

SEQ ID NO: 40868 - DNA, 18 bp, Artificial Sequence
  Synthetic: FXN 3 reverse 9:69043935-69043956; SpCas9
agagtttgagaccaacct

SEQ ID NO: 40869 - DNA, 25 bp, Artificial Sequence
  Synthetic: FXN 3 reverse 9:69043929-69043957; SpCas9
tgagctcaagagtttgagaccaacc

SEQ ID NO: 40870 - DNA, 24 bp, Artificial Sequence
  Synthetic: FXN 3 reverse 9:69043930-69043957; SpCas9
gagctcaagagtttgagaccaacc

SEQ ID NO: 40871 - DNA, 23 bp, Artificial Sequence
  Synthetic: FXN 3 reverse 9:69043931-69043957; SpCas9
agctcaagagtttgagaccaacc

SEQ ID NO: 40872 - DNA, 22 bp, Artificial Sequence
  Synthetic: FXN 3 reverse 9:69043932-69043957; SpCas9
gctcaagagtttgagaccaacc

SEQ ID NO: 40873 - DNA, 21 bp, Artificial Sequence
  Synthetic: FXN 3 reverse 9:69043933-69043957; SpCas9
ctcaagagtttgagaccaacc

SEQ ID NO: 40874 - DNA, 20 bp, Artificial Sequence
  Synthetic: FXN 3 reverse 9:69043934-69043957; SpCas9
tcaagagtttgagaccaacc

SEQ ID NO: 40875 - DNA, 19 bp, Artificial Sequence
  Synthetic: FXN 3 reverse 9:69043935-69043957; SpCas9
caagagtttgagaccaacc

SEQ ID NO: 40876 - DNA, 18 bp, Artificial Sequence
  Synthetic: FXN 3 reverse 9:69043936-69043957; SpCas9
aagagtttgagaccaacc

SEQ ID NO: 40877 - DNA, 25 bp, Artificial Sequence
  Synthetic: FXN 3 forward 9:69043931-69043959; SpCas9
aggttggtctcaaactcttgagctc

SEQ ID NO: 40878 - DNA, 24 bp, Artificial Sequence
  Synthetic: FXN 3 forward 9:69043932-69043959; SpCas9
ggttggtctcaaactcttgagctc

SEQ ID NO: 40879 - DNA, 23 bp, Artificial Sequence
  Synthetic: FXN 3 forward 9:69043933-69043959; SpCas9
gttggtctcaaactcttgagctc

SEQ ID NO: 40880 - DNA, 22 bp, Artificial Sequence
  Synthetic: FXN 3 forward 9:69043934-69043959; SpCas9
ttggtctcaaactcttgagctc

SEQ ID NO: 40881 - DNA, 21 bp, Artificial Sequence
  Synthetic: FXN 3 forward 9:69043935-69043959; SpCas9
tggtctcaaactcttgagctc

SEQ ID NO: 40882 - DNA, 20 bp, Artificial Sequence
  Synthetic: FXN 3 forward 9:69043936-69043959; SpCas9
ggtctcaaactcttgagctc

SEQ ID NO: 40883 - DNA, 19 bp, Artificial Sequence
  Synthetic: FXN 3 forward 9:69043937-69043959; SpCas9
gtctcaaactcttgagctc

SEQ ID NO: 40884 - DNA, 18 bp, Artificial Sequence
  Synthetic: FXN 3 forward 9:69043938-69043959; SpCas9
tctcaaactcttgagctc

SEQ ID NO: 40885 - DNA, 25 bp, Artificial Sequence
  Synthetic: FXN 3 reverse 9:69043939-69043967; SpCas9
gaggattacttgagctcaagagttt

SEQ ID NO: 40886 - DNA, 24 bp, Artificial Sequence
  Synthetic: FXN 3 reverse 9:69043940-69043967; SpCas9
aggattacttgagctcaagagttt

SEQ ID NO: 40887 - DNA, 23 bp, Artificial Sequence
  Synthetic: FXN 3 reverse 9:69043941-69043967; SpCas9
ggattacttgagctcaagagttt

SEQ ID NO: 40888 - DNA, 22 bp, Artificial Sequence
  Synthetic: FXN 3 reverse 9:69043942-69043967; SpCas9
gattacttgagctcaagagttt

SEQ ID NO: 40889 - DNA, 21 bp, Artificial Sequence
  Synthetic: FXN 3 reverse 9:69043943-69043967; SpCas9
attacttgagctcaagagttt

SEQ ID NO: 40890 - DNA, 20 bp, Artificial Sequence
  Synthetic: FXN 3 reverse 9:69043944-69043967; SpCas9
ttacttgagctcaagagttt

SEQ ID NO: 40891 - DNA, 19 bp, Artificial Sequence
  Synthetic: FXN 3 reverse 9:69043945-69043967; SpCas9
tacttgagctcaagagttt

SEQ ID NO: 40892 - DNA, 18 bp, Artificial Sequence
  Synthetic: FXN 3 reverse 9:69043946-69043967; SpCas9
acttgagctcaagagttt

SEQ ID NO: 40893 - DNA, 25 bp, Artificial Sequence
  Synthetic: FXN 3 reverse 9:69043945-69043973; SpCas9
aggtgggaggattacttgagctcaa

SEQ ID NO: 40894 - DNA, 24 bp, Artificial Sequence
  Synthetic: FXN 3 reverse 9:69043946-69043973; SpCas9
ggtgggaggattacttgagctcaa

SEQ ID NO: 40895 - DNA, 23 bp, Artificial Sequence
  Synthetic: FXN 3 reverse 9:69043947-69043973; SpCas9
gtgggaggattacttgagctcaa

SEQ ID NO: 40896 - DNA, 22 bp, Artificial Sequence
  Synthetic: FXN 3 reverse 9:69043948-69043973; SpCas9
tgggaggattacttgagctcaa

SEQ ID NO: 40897 - DNA, 21 bp, Artificial Sequence
  Synthetic: FXN 3 reverse 9:69043949-69043973; SpCas9
gggaggattacttgagctcaa

SEQ ID NO: 40898 - DNA, 20 bp, Artificial Sequence
  Synthetic: FXN 3 reverse 9:69043950-69043973; SpCas9
ggaggattacttgagctcaa

SEQ ID NO: 40899 - DNA, 19 bp, Artificial Sequence
  Synthetic: FXN 3 reverse 9:69043951-69043973; SpCas9
gaggattacttgagctcaa

SEQ ID NO: 40900 - DNA, 18 bp, Artificial Sequence
  Synthetic: FXN 3 reverse 9:69043952-69043973; SpCas9
aggattacttgagctcaa

SEQ ID NO: 40901 - DNA, 25 bp, Artificial Sequence
  Synthetic: FXN 3 reverse 9:69043947-69043975; SpCas9
caaggtgggaggattacttgagctc

SEQ ID NO: 40902 - DNA, 24 bp, Artificial Sequence
  Synthetic: FXN 3 reverse 9:69043948-69043975; SpCas9
aaggtgggaggattacttgagctc

SEQ ID NO: 40903 - DNA, 23 bp, Artificial Sequence
  Synthetic: FXN 3 reverse 9:69043949-69043975; SpCas9
aggtgggaggattacttgagctc

SEQ ID NO: 40904 - DNA, 22 bp, Artificial Sequence
  Synthetic: FXN 3 reverse 9:69043950-69043975; SpCas9
ggtgggaggattacttgagctc

SEQ ID NO: 40905 - DNA, 21 bp, Artificial Sequence
  Synthetic: FXN 3 reverse 9:69043951-69043975; SpCas9
gtgggaggattacttgagctc

SEQ ID NO: 40906 - DNA, 20 bp, Artificial Sequence
  Synthetic: FXN 3 reverse 9:69043952-69043975; SpCas9
tgggaggattacttgagctc

SEQ ID NO: 40907 - DNA, 19 bp, Artificial Sequence
  Synthetic: FXN 3 reverse 9:69043953-69043975; SpCas9
gggaggattacttgagctc

SEQ ID NO: 40908 - DNA, 18 bp, Artificial Sequence
  Synthetic: FXN 3 reverse 9:69043954-69043975; SpCas9
ggaggattacttgagctc

SEQ ID NO: 40909 - DNA, 25 bp, Artificial Sequence
  Synthetic: FXN 3 forward 9:69043948-69043976; SpCas9
ttgagctcaagtaatcctcccacct

SEQ ID NO: 40910 - DNA, 24 bp, Artificial Sequence
  Synthetic: FXN 3 forward 9:69043949-69043976; SpCas9
tgagctcaagtaatcctcccacct

SEQ ID NO: 40911 - DNA, 23 bp, Artificial Sequence
  Synthetic: FXN 3 forward 9:69043950-69043976; SpCas9
gagctcaagtaatcctcccacct

SEQ ID NO: 40912 - DNA, 22 bp, Artificial Sequence
  Synthetic: FXN 3 forward 9:69043951-69043976; SpCas9
agctcaagtaatcctcccacct

SEQ ID NO: 40913 - DNA, 21 bp, Artificial Sequence
  Synthetic: FXN 3 forward 9:69043952-69043976; SpCas9
gctcaagtaatcctcccacct

SEQ ID NO: 40914 - DNA, 20 bp, Artificial Sequence
  Synthetic: FXN 3 forward 9:69043953-69043976; SpCas9
ctcaagtaatcctcccacct

SEQ ID NO: 40915 - DNA, 19 bp, Artificial Sequence
  Synthetic: FXN 3 forward 9:69043954-69043976; SpCas9
tcaagtaatcctcccacct

SEQ ID NO: 40916 - DNA, 18 bp, Artificial Sequence
  Synthetic: FXN 3 forward 9:69043955-69043976; SpCas9
caagtaatcctcccacct

SEQ ID NO: 40917 - DNA, 25 bp, Artificial Sequence
  Synthetic: FXN 3 reverse 9:69043953-69043981; SpCas9
ggaggccaaggtgggaggattactt

SEQ ID NO: 40918 - DNA, 24 bp, Artificial Sequence
  Synthetic: FXN 3 reverse 9:69043954-69043981; SpCas9
gaggccaaggtgggaggattactt

SEQ ID NO: 40919 - DNA, 23 bp, Artificial Sequence
  Synthetic: FXN 3 reverse 9:69043955-69043981; SpCas9
aggccaaggtgggaggattactt

SEQ ID NO: 40920 - DNA, 22 bp, Artificial Sequence
  Synthetic: FXN 3 reverse 9:69043956-69043981; SpCas9
ggccaaggtgggaggattactt

SEQ ID NO: 40921 - DNA, 21 bp, Artificial Sequence
  Synthetic: FXN 3 reverse 9:69043957-69043981; SpCas9
gccaaggtgggaggattactt

SEQ ID NO: 40922 - DNA, 20 bp, Artificial Sequence
  Synthetic: FXN 3 reverse 9:69043958-69043981; SpCas9
ccaaggtgggaggattactt

SEQ ID NO: 40923 - DNA, 19 bp, Artificial Sequence
  Synthetic: FXN 3 reverse 9:69043959-69043981; SpCas9
caaggtgggaggattactt

SEQ ID NO: 40924 - DNA, 18 bp, Artificial Sequence
  Synthetic: FXN 3 reverse 9:69043960-69043981; SpCas9
aaggtgggaggattactt

SEQ ID NO: 40925 - DNA, 25 bp, Artificial Sequence
  Synthetic: FXN 3 forward 9:69043958-69043986; SpCas9
gtaatcctcccaccttggcctccca

SEQ ID NO: 40926 - DNA, 24 bp, Artificial Sequence
  Synthetic: FXN 3 forward 9:69043959-69043986; SpCas9
taatcctcccaccttggcctccca

SEQ ID NO: 40927 - DNA, 23 bp, Artificial Sequence
  Synthetic: FXN 3 forward 9:69043960-69043986; SpCas9
aatcctcccaccttggcctccca

SEQ ID NO: 40928 - DNA, 22 bp, Artificial Sequence
  Synthetic: FXN 3 forward 9:69043961-69043986; SpCas9
atcctcccaccttggcctccca

SEQ ID NO: 40929 - DNA, 21 bp, Artificial Sequence
  Synthetic: FXN 3 forward 9:69043962-69043986; SpCas9
tcctcccaccttggcctccca

SEQ ID NO: 40930 - DNA, 20 bp, Artificial Sequence
  Synthetic: FXN 3 forward 9:69043963-69043986; SpCas9
cctcccaccttggcctccca

SEQ ID NO: 40931 - DNA, 19 bp, Artificial Sequence
  Synthetic: FXN 3 forward 9:69043964-69043986; SpCas9
ctcccaccttggcctccca

SEQ ID NO: 40932 - DNA, 18 bp, Artificial Sequence
  Synthetic: FXN 3 forward 9:69043965-69043986; SpCas9
tcccaccttggcctccca

SEQ ID NO: 40933 - DNA, 25 bp, Artificial Sequence
  Synthetic: FXN 3 forward 9:69043963-69043991; SpCas9
cctcccaccttggcctcccaaagtg

SEQ ID NO: 40934 - DNA, 24 bp, Artificial Sequence
  Synthetic: FXN 3 forward 9:69043964-69043991; SpCas9
ctcccaccttggcctcccaaagtg

SEQ ID NO: 40935 - DNA, 23 bp, Artificial Sequence
  Synthetic: FXN 3 forward 9:69043965-69043991; SpCas9
tcccaccttggcctcccaaagtg

SEQ ID NO: 40936 - DNA, 22 bp, Artificial Sequence
  Synthetic: FXN 3 forward 9:69043966-69043991; SpCas9
cccaccttggcctcccaaagtg

SEQ ID NO: 40937 - DNA, 21 bp, Artificial Sequence
  Synthetic: FXN 3 forward 9:69043967-69043991; SpCas9
ccaccttggcctcccaaagtg

SEQ ID NO: 40938 - DNA, 20 bp, Artificial Sequence
  Synthetic: FXN 3 forward 9:69043968-69043991; SpCas9
caccttggcctcccaaagtg

SEQ ID NO: 40939 - DNA, 19 bp, Artificial Sequence
  Synthetic: FXN 3 forward 9:69043969-69043991; SpCas9
accttggcctcccaaagtg

SEQ ID NO: 40940 - DNA, 18 bp, Artificial Sequence
  Synthetic: FXN 3 forward 9:69043970-69043991; SpCas9
ccttggcctcccaaagtg

SEQ ID NO: 40941 - DNA, 25 bp, Artificial Sequence
  Synthetic: FXN 3 reverse 9:69043963-69043991; SpCas9
ccgcactttgggaggccaaggtggg

SEQ ID NO: 40942 - DNA, 24 bp, Artificial Sequence
  Synthetic: FXN 3 reverse 9:69043964-69043991; SpCas9
cgcactttgggaggccaaggtggg

SEQ ID NO: 40943 - DNA, 23 bp, Artificial Sequence
  Synthetic: FXN 3 reverse 9:69043965-69043991; SpCas9
gcactttgggaggccaaggtggg

SEQ ID NO: 40944 - DNA, 22 bp, Artificial Sequence
  Synthetic: FXN 3 reverse 9:69043966-69043991; SpCas9
cactttgggaggccaaggtggg

SEQ ID NO: 40945 - DNA, 21 bp, Artificial Sequence
  Synthetic: FXN 3 reverse 9:69043967-69043991; SpCas9
actttgggaggccaaggtggg

SEQ ID NO: 40946 - DNA, 20 bp, Artificial Sequence
  Synthetic: FXN 3 reverse 9:69043968-69043991; SpCas9
ctttgggaggccaaggtggg

SEQ ID NO: 40947 - DNA, 19 bp, Artificial Sequence
  Synthetic: FXN 3 reverse 9:69043969-69043991; SpCas9
tttgggaggccaaggtggg

SEQ ID NO: 40948 - DNA, 18 bp, Artificial Sequence
  Synthetic: FXN 3 reverse 9:69043970-69043991; SpCas9
ttgggaggccaaggtggg

SEQ ID NO: 40949 - DNA, 25 bp, Artificial Sequence
  Synthetic: FXN 3 forward 9:69043964-69043992; SpCas9
ctcccaccttggcctcccaaagtgc

SEQ ID NO: 40950 - DNA, 24 bp, Artificial Sequence
  Synthetic: FXN 3 forward 9:69043965-69043992; SpCas9
tcccaccttggcctcccaaagtgc

SEQ ID NO: 40951 - DNA, 23 bp, Artificial Sequence
  Synthetic: FXN 3 forward 9:69043966-69043992; SpCas9
cccaccttggcctcccaaagtgc

SEQ ID NO: 40952 - DNA, 22 bp, Artificial Sequence
  Synthetic: FXN 3 forward 9:69043967-69043992; SpCas9
ccaccttggcctcccaaagtgc

SEQ ID NO: 40953 - DNA, 21 bp, Artificial Sequence
  Synthetic: FXN 3 forward 9:69043968-69043992; SpCas9
caccttggcctcccaaagtgc

SEQ ID NO: 40954 - DNA, 20 bp, Artificial Sequence
  Synthetic: FXN 3 forward 9:69043969-69043992; SpCas9
accttggcctcccaaagtgc

SEQ ID NO: 40955 - DNA, 19 bp, Artificial Sequence
  Synthetic: FXN 3 forward 9:69043970-69043992; SpCas9
ccttggcctcccaaagtgc

SEQ ID NO: 40956 - DNA, 18 bp, Artificial Sequence
  Synthetic: FXN 3 forward 9:69043971-69043992; SpCas9
cttggcctcccaaagtgc

SEQ ID NO: 40957 - DNA, 25 bp, Artificial Sequence
  Synthetic: FXN 3 reverse 9:69043964-69043992; SpCas9
cccgcactttgggaggccaaggtgg

SEQ ID NO: 40958 - DNA, 24 bp, Artificial Sequence
  Synthetic: FXN 3 reverse 9:69043965-69043992; SpCas9
ccgcactttgggaggccaaggtgg

SEQ ID NO: 40959 - DNA, 23 bp, Artificial Sequence
  Synthetic: FXN 3 reverse 9:69043966-69043992; SpCas9
cgcactttgggaggccaaggtgg

SEQ ID NO: 40960 - DNA, 22 bp, Artificial Sequence
  Synthetic: FXN 3 reverse 9:69043967-69043992; SpCas9
gcactttgggaggccaaggtgg

SEQ ID NO: 40961 - DNA, 21 bp, Artificial Sequence
  Synthetic: FXN 3 reverse 9:69043968-69043992; SpCas9
cactttgggaggccaaggtgg

SEQ ID NO: 40962 - DNA, 20 bp, Artificial Sequence
  Synthetic: FXN 3 reverse 9:69043969-69043992; SpCas9
actttgggaggccaaggtgg

SEQ ID NO: 40963 - DNA, 19 bp, Artificial Sequence
  Synthetic: FXN 3 reverse 9:69043970-69043992; SpCas9
ctttgggaggccaaggtgg

SEQ ID NO: 40964 - DNA, 18 bp, Artificial Sequence
  Synthetic: FXN 3 reverse 9:69043971-69043992; SpCas9
tttgggaggccaaggtgg

SEQ ID NO: 40965 - DNA, 25 bp, Artificial Sequence
  Synthetic: FXN 3 forward 9:69043965-69043993; SpCas9
tcccaccttggcctcccaaagtgcg

SEQ ID NO: 40966 - DNA, 24 bp, Artificial Sequence
  Synthetic: FXN 3 forward 9:69043966-69043993; SpCas9
cccaccttggcctcccaaagtgcg

SEQ ID NO: 40967 - DNA, 23 bp, Artificial Sequence
  Synthetic: FXN 3 forward 9:69043967-69043993; SpCas9
ccaccttggcctcccaaagtgcg

SEQ ID NO: 40968 - DNA, 22 bp, Artificial Sequence
  Synthetic: FXN 3 forward 9:69043968-69043993; SpCas9
caccttggcctcccaaagtgcg

SEQ ID NO: 40969 - DNA, 21 bp, Artificial Sequence
  Synthetic: FXN 3 forward 9:69043969-69043993; SpCas9
accttggcctcccaaagtgcg

SEQ ID NO: 40970 - DNA, 20 bp, Artificial Sequence
  Synthetic: FXN 3 forward 9:69043970-69043993; SpCas9
ccttggcctcccaaagtgcg

SEQ ID NO: 40971 - DNA, 19 bp, Artificial Sequence
  Synthetic: FXN 3 forward 9:69043971-69043993; SpCas9
cttggcctcccaaagtgcg

SEQ ID NO: 40972 - DNA, 18 bp, Artificial Sequence
  Synthetic: FXN 3 forward 9:69043972-69043993; SpCas9
ttggcctcccaaagtgcg

SEQ ID NO: 40973 - DNA, 25 bp, Artificial Sequence
  Synthetic: FXN 3 reverse 9:69043966-69043994; SpCas9
tccccgcactttgggaggccaaggt

SEQ ID NO: 40974 - DNA, 24 bp, Artificial Sequence
  Synthetic: FXN 3 reverse 9:69043967-69043994; SpCas9
ccccgcactttgggaggccaaggt

SEQ ID NO: 40975 - DNA, 23 bp, Artificial Sequence
  Synthetic: FXN 3 reverse 9:69043968-69043994; SpCas9
cccgcactttgggaggccaaggt

SEQ ID NO: 40976 - DNA, 22 bp, Artificial Sequence
  Synthetic: FXN 3 reverse 9:69043969-69043994; SpCas9
ccgcactttgggaggccaaggt

SEQ ID NO: 40977 - DNA, 21 bp, Artificial Sequence
  Synthetic: FXN 3 reverse 9:69043970-69043994; SpCas9
cgcactttgggaggccaaggt

SEQ ID NO: 40978 - DNA, 20 bp, Artificial Sequence
  Synthetic: FXN 3 reverse 9:69043971-69043994; SpCas9
gcactttgggaggccaaggt

SEQ ID NO: 40979 - DNA, 19 bp, Artificial Sequence
  Synthetic: FXN 3 reverse 9:69043972-69043994; SpCas9
cactttgggaggccaaggt

SEQ ID NO: 40980 - DNA, 18 bp, Artificial Sequence
  Synthetic: FXN 3 reverse 9:69043973-69043994; SpCas9
actttgggaggccaaggt

SEQ ID NO: 40981 - DNA, 25 bp, Artificial Sequence
  Synthetic: FXN 3 reverse 9:69043967-69043995; SpCas9
atccccgcactttgggaggccaagg

SEQ ID NO: 40982 - DNA, 24 bp, Artificial Sequence
  Synthetic: FXN 3 reverse 9:69043968-69043995; SpCas9
tccccgcactttgggaggccaagg

SEQ ID NO: 40983 - DNA, 23 bp, Artificial Sequence
  Synthetic: FXN 3 reverse 9:69043969-69043995; SpCas9
ccccgcactttgggaggccaagg

SEQ ID NO: 40984 - DNA, 22 bp, Artificial Sequence
  Synthetic: FXN 3 reverse 9:69043970-69043995; SpCas9
cccgcactttgggaggccaagg

SEQ ID NO: 40985 - DNA, 21 bp, Artificial Sequence
  Synthetic: FXN 3 reverse 9:69043971-69043995; SpCas9
ccgcactttgggaggccaagg

SEQ ID NO: 40986 - DNA, 20 bp, Artificial Sequence
  Synthetic: FXN 3 reverse 9:69043972-69043995; SpCas9
cgcactttgggaggccaagg

SEQ ID NO: 40987 - DNA, 19 bp, Artificial Sequence
  Synthetic: FXN 3 reverse 9:69043973-69043995; SpCas9
gcactttgggaggccaagg

SEQ ID NO: 40988 - DNA, 18 bp, Artificial Sequence
  Synthetic: FXN 3 reverse 9:69043974-69043995; SpCas9
cactttgggaggccaagg

SEQ ID NO: 40989 - DNA, 25 bp, Artificial Sequence
  Synthetic: FXN 3 reverse 9:69043970-69043998; SpCas9
gtaatccccgcactttgggaggcca

SEQ ID NO: 40990 - DNA, 24 bp, Artificial Sequence
  Synthetic: FXN 3 reverse 9:69043971-69043998; SpCas9
taatccccgcactttgggaggcca

SEQ ID NO: 40991 - DNA, 23 bp, Artificial Sequence
  Synthetic: FXN 3 reverse 9:69043972-69043998; SpCas9
aatccccgcactttgggaggcca

SEQ ID NO: 40992 - DNA, 22 bp, Artificial Sequence
  Synthetic: FXN 3 reverse 9:69043973-69043998; SpCas9
atccccgcactttgggaggcca

SEQ ID NO: 40993 - DNA, 21 bp, Artificial Sequence
  Synthetic: FXN 3 reverse 9:69043974-69043998; SpCas9
tccccgcactttgggaggcca

SEQ ID NO: 40994 - DNA, 20 bp, Artificial Sequence
  Synthetic: FXN 3 reverse 9:69043975-69043998; SpCas9
ccccgcactttgggaggcca

SEQ ID NO: 40995 - DNA, 19 bp, Artificial Sequence
  Synthetic: FXN 3 reverse 9:69043976-69043998; SpCas9
cccgcactttgggaggcca

SEQ ID NO: 40996 - DNA, 18 bp, Artificial Sequence
  Synthetic: FXN 3 reverse 9:69043977-69043998; SpCas9
ccgcactttgggaggcca

SEQ ID NO: 40997 - DNA, 25 bp, Artificial Sequence
  Synthetic: FXN 3 reverse 9:69043971-69043999; SpCas9
tgtaatccccgcactttgggaggcc

SEQ ID NO: 40998 - DNA, 24 bp, Artificial Sequence
  Synthetic: FXN 3 reverse 9:69043972-69043999; SpCas9
gtaatccccgcactttgggaggcc

SEQ ID NO: 40999 - DNA, 23 bp, Artificial Sequence
  Synthetic: FXN 3 reverse 9:69043973-69043999; SpCas9
taatccccgcactttgggaggcc

SEQ ID NO: 41000 - DNA, 22 bp, Artificial Sequence
  Synthetic: FXN 3 reverse 9:69043974-69043999; SpCas9
aatccccgcactttgggaggcc

SEQ ID NO: 41001 - DNA, 21 bp, Artificial Sequence
  Synthetic: FXN 3 reverse 9:69043975-69043999; SpCas9
atccccgcactttgggaggcc

SEQ ID NO: 41002 - DNA, 20 bp, Artificial Sequence
  Synthetic: FXN 3 reverse 9:69043976-69043999; SpCas9
tccccgcactttgggaggcc

SEQ ID NO: 41003 - DNA, 19 bp, Artificial Sequence
  Synthetic: FXN 3 reverse 9:69043977-69043999; SpCas9
ccccgcactttgggaggcc

SEQ ID NO: 41004 - DNA, 18 bp, Artificial Sequence
  Synthetic: FXN 3 reverse 9:69043978-69043999; SpCas9
cccgcactttgggaggcc

SEQ ID NO: 41005 - DNA, 25 bp, Artificial Sequence
  Synthetic: FXN 3 forward 9:69043972-69044000; SpCas9
ttggcctcccaaagtgcggggatta

SEQ ID NO: 41006 - DNA, 24 bp, Artificial Sequence
  Synthetic: FXN 3 forward 9:69043973-69044000; SpCas9
tggcctcccaaagtgcggggatta

SEQ ID NO: 41007 - DNA, 23 bp, Artificial Sequence
  Synthetic: FXN 3 forward 9:69043974-69044000; SpCas9
ggcctcccaaagtgcggggatta

SEQ ID NO: 41008 - DNA, 22 bp, Artificial Sequence
  Synthetic: FXN 3 forward 9:69043975-69044000; SpCas9
gcctcccaaagtgcggggatta

SEQ ID NO: 41009 - DNA, 21 bp, Artificial Sequence
  Synthetic: FXN 3 forward 9:69043976-69044000; SpCas9
cctcccaaagtgcggggatta

SEQ ID NO: 41010 - DNA, 20 bp, Artificial Sequence
  Synthetic: FXN 3 forward 9:69043977-69044000; SpCas9
ctcccaaagtgcggggatta

SEQ ID NO: 41011 - DNA, 19 bp, Artificial Sequence
  Synthetic: FXN 3 forward 9:69043978-69044000; SpCas9
tcccaaagtgcggggatta

SEQ ID NO: 41012 - DNA, 18 bp, Artificial Sequence
  Synthetic: FXN 3 forward 9:69043979-69044000; SpCas9
cccaaagtgcggggatta

SEQ ID NO: 41013 - DNA, 25 bp, Artificial Sequence
  Synthetic: FXN 3 forward 9:69043973-69044001; SpCas9
tggcctcccaaagtgcggggattac

SEQ ID NO: 41014 - DNA, 24 bp, Artificial Sequence
  Synthetic: FXN 3 forward 9:69043974-69044001; SpCas9
ggcctcccaaagtgcggggattac

SEQ ID NO: 41015 - DNA, 23 bp, Artificial Sequence
  Synthetic: FXN 3 forward 9:69043975-69044001; SpCas9
gcctcccaaagtgcggggattac

SEQ ID NO: 41016 - DNA, 22 bp, Artificial Sequence
  Synthetic: FXN 3 forward 9:69043976-69044001; SpCas9
cctcccaaagtgcggggattac

SEQ ID NO: 41017 - DNA, 21 bp, Artificial Sequence
  Synthetic: FXN 3 forward 9:69043977-69044001; SpCas9
ctcccaaagtgcggggattac

SEQ ID NO: 41018 - DNA, 20 bp, Artificial Sequence
  Synthetic: FXN 3 forward 9:69043978-69044001; SpCas9
tcccaaagtgcggggattac

SEQ ID NO: 41019 - DNA, 19 bp, Artificial Sequence
  Synthetic: FXN 3 forward 9:69043979-69044001; SpCas9
cccaaagtgcggggattac

SEQ ID NO: 41020 - DNA, 18 bp, Artificial Sequence
  Synthetic: FXN 3 forward 9:69043980-69044001; SpCas9
ccaaagtgcggggattac

SEQ ID NO: 41021 - DNA, 25 bp, Artificial Sequence
  Synthetic: FXN 3 reverse 9:69043976-69044004; SpCas9
acacctgtaatccccgcactttggg

SEQ ID NO: 41022 - DNA, 24 bp, Artificial Sequence
  Synthetic: FXN 3 reverse 9:69043977-69044004; SpCas9
cacctgtaatccccgcactttggg

SEQ ID NO: 41023 - DNA, 23 bp, Artificial Sequence
  Synthetic: FXN 3 reverse 9:69043978-69044004; SpCas9
acctgtaatccccgcactttggg

SEQ ID NO: 41024 - DNA, 22 bp, Artificial Sequence
  Synthetic: FXN 3 reverse 9:69043979-69044004; SpCas9
cctgtaatccccgcactttggg

SEQ ID NO: 41025 - DNA, 21 bp, Artificial Sequence
  Synthetic: FXN 3 reverse 9:69043980-69044004; SpCas9
ctgtaatccccgcactttggg

SEQ ID NO: 41026 - DNA, 20 bp, Artificial Sequence
  Synthetic: FXN 3 reverse 9:69043981-69044004; SpCas9
tgtaatccccgcactttggg

SEQ ID NO: 41027 - DNA, 19 bp, Artificial Sequence
  Synthetic: FXN 3 reverse 9:69043982-69044004; SpCas9
gtaatccccgcactttggg

SEQ ID NO: 41028 - DNA, 18 bp, Artificial Sequence
  Synthetic: FXN 3 reverse 9:69043983-69044004; SpCas9
taatccccgcactttggg

SEQ ID NO: 41029 - DNA, 25 bp, Artificial Sequence
  Synthetic: FXN 3 reverse 9:69043977-69044005; SpCas9
cacacctgtaatccccgcactttgg

SEQ ID NO: 41030 - DNA, 24 bp, Artificial Sequence
  Synthetic: FXN 3 reverse 9:69043978-69044005; SpCas9
acacctgtaatccccgcactttgg

SEQ ID NO: 41031 - DNA, 23 bp, Artificial Sequence
  Synthetic: FXN 3 reverse 9:69043979-69044005; SpCas9
cacctgtaatccccgcactttgg

SEQ ID NO: 41032 - DNA, 22 bp, Artificial Sequence
  Synthetic: FXN 3 reverse 9:69043980-69044005; SpCas9
acctgtaatccccgcactttgg

SEQ ID NO: 41033 - DNA, 21 bp, Artificial Sequence
  Synthetic: FXN 3 reverse 9:69043981-69044005; SpCas9
cctgtaatccccgcactttgg

SEQ ID NO: 41034 - DNA, 20 bp, Artificial Sequence
  Synthetic: FXN 3 reverse 9:69043982-69044005; SpCas9
ctgtaatccccgcactttgg

SEQ ID NO: 41035 - DNA, 19 bp, Artificial Sequence
  Synthetic: FXN 3 reverse 9:69043983-69044005; SpCas9
tgtaatccccgcactttgg

SEQ ID NO: 41036 - DNA, 18 bp, Artificial Sequence
  Synthetic: FXN 3 reverse 9:69043984-69044005; SpCas9
gtaatccccgcactttgg

SEQ ID NO: 41037 - DNA, 25 bp, Artificial Sequence
  Synthetic: FXN 3 forward 9:69043979-69044007; SpCas9
cccaaagtgcggggattacaggtgt

SEQ ID NO: 41038 - DNA, 24 bp, Artificial Sequence
  Synthetic: FXN 3 forward 9:69043980-69044007; SpCas9
ccaaagtgcggggattacaggtgt

SEQ ID NO: 41039 - DNA, 23 bp, Artificial Sequence
  Synthetic: FXN 3 forward 9:69043981-69044007; SpCas9
caaagtgcggggattacaggtgt

SEQ ID NO: 41040 - DNA, 22 bp, Artificial Sequence
  Synthetic: FXN 3 forward 9:69043982-69044007; SpCas9
aaagtgcggggattacaggtgt

SEQ ID NO: 41041 - DNA, 21 bp, Artificial Sequence
  Synthetic: FXN 3 forward 9:69043983-69044007; SpCas9
aagtgcggggattacaggtgt

SEQ ID NO: 41042 - DNA, 20 bp, Artificial Sequence
  Synthetic: FXN 3 forward 9:69043984-69044007; SpCas9
agtgcggggattacaggtgt

SEQ ID NO: 41043 - DNA, 19 bp, Artificial Sequence
  Synthetic: FXN 3 forward 9:69043985-69044007; SpCas9
gtgcggggattacaggtgt

SEQ ID NO: 41044 - DNA, 18 bp, Artificial Sequence
  Synthetic: FXN 3 forward 9:69043986-69044007; SpCas9
tgcggggattacaggtgt

SEQ ID NO: 41045 - DNA, 25 bp, Artificial Sequence
  Synthetic: FXN 3 reverse 9:69043979-69044007; SpCas9
ctcacacctgtaatccccgcacttt

SEQ ID NO: 41046 - DNA, 24 bp, Artificial Sequence
  Synthetic: FXN 3 reverse 9:69043980-69044007; SpCas9
tcacacctgtaatccccgcacttt

SEQ ID NO: 41047 - DNA, 23 bp, Artificial Sequence
  Synthetic: FXN 3 reverse 9:69043981-69044007; SpCas9
cacacctgtaatccccgcacttt

SEQ ID NO: 41048 - DNA, 22 bp, Artificial Sequence
  Synthetic: FXN 3 reverse 9:69043982-69044007; SpCas9
acacctgtaatccccgcacttt

SEQ ID NO: 41049 - DNA, 21 bp, Artificial Sequence
  Synthetic: FXN 3 reverse 9:69043983-69044007; SpCas9
cacctgtaatccccgcacttt

SEQ ID NO: 41050 - DNA, 20 bp, Artificial Sequence
  Synthetic: FXN 3 reverse 9:69043984-69044007; SpCas9
acctgtaatccccgcacttt

SEQ ID NO: 41051 - DNA, 19 bp, Artificial Sequence
  Synthetic: FXN 3 reverse 9:69043985-69044007; SpCas9
cctgtaatccccgcacttt

SEQ ID NO: 41052 - DNA, 18 bp, Artificial Sequence
  Synthetic: FXN 3 reverse 9:69043986-69044007; SpCas9
ctgtaatccccgcacttt

SEQ ID NO: 41053 - DNA, 25 bp, Artificial Sequence
  Synthetic: FXN 3 reverse 9:69043980-69044008; SpCas9
gctcacacctgtaatccccgcactt

SEQ ID NO: 41054 - DNA, 24 bp, Artificial Sequence
  Synthetic: FXN 3 reverse 9:69043981-69044008; SpCas9
ctcacacctgtaatccccgcactt

SEQ ID NO: 41055 - DNA, 23 bp, Artificial Sequence
  Synthetic: FXN 3 reverse 9:69043982-69044008; SpCas9
tcacacctgtaatccccgcactt

SEQ ID NO: 41056 - DNA, 22 bp, Artificial Sequence
  Synthetic: FXN 3 reverse 9:69043983-69044008; SpCas9
cacacctgtaatccccgcactt

SEQ ID NO: 41057 - DNA, 21 bp, Artificial Sequence
  Synthetic: FXN 3 reverse 9:69043984-69044008; SpCas9
acacctgtaatccccgcactt

SEQ ID NO: 41058 - DNA, 20 bp, Artificial Sequence
  Synthetic: FXN 3 reverse 9:69043985-69044008; SpCas9
cacctgtaatccccgcactt

SEQ ID NO: 41059 - DNA, 19 bp, Artificial Sequence
  Synthetic: FXN 3 reverse 9:69043986-69044008; SpCas9
acctgtaatccccgcactt

SEQ ID NO: 41060 - DNA, 18 bp, Artificial Sequence
  Synthetic: FXN 3 reverse 9:69043987-69044008; SpCas9
cctgtaatccccgcactt

SEQ ID NO: 41061 - DNA, 25 bp, Artificial Sequence
  Synthetic: FXN 3 forward 9:69043992-69044020; SpCas9
gattacaggtgtgagctaccatgcc

SEQ ID NO: 41062 - DNA, 24 bp, Artificial Sequence
  Synthetic: FXN 3 forward 9:69043993-69044020; SpCas9
attacaggtgtgagctaccatgcc

SEQ ID NO: 41063 - DNA, 23 bp, Artificial Sequence
  Synthetic: FXN 3 forward 9:69043994-69044020; SpCas9
ttacaggtgtgagctaccatgcc

SEQ ID NO: 41064 - DNA, 22 bp, Artificial Sequence
  Synthetic: FXN 3 forward 9:69043995-69044020; SpCas9
tacaggtgtgagctaccatgcc

SEQ ID NO: 41065 - DNA, 21 bp, Artificial Sequence
  Synthetic: FXN 3 forward 9:69043996-69044020; SpCas9
acaggtgtgagctaccatgcc

SEQ ID NO: 41066 - DNA, 20 bp, Artificial Sequence
  Synthetic: FXN 3 forward 9:69043997-69044020; SpCas9
caggtgtgagctaccatgcc

SEQ ID NO: 41067 - DNA, 19 bp, Artificial Sequence
  Synthetic: FXN 3 forward 9:69043998-69044020; SpCas9
aggtgtgagctaccatgcc

SEQ ID NO: 41068 - DNA, 18 bp, Artificial Sequence
  Synthetic: FXN 3 forward 9:69043999-69044020; SpCas9
ggtgtgagctaccatgcc

SEQ ID NO: 41069 - DNA, 25 bp, Artificial Sequence
  Synthetic: FXN 3 forward 9:69043997-69044025; SpCas9
caggtgtgagctaccatgcccagcc

SEQ ID NO: 41070 - DNA, 24 bp, Artificial Sequence
  Synthetic: FXN 3 forward 9:69043998-69044025; SpCas9
aggtgtgagctaccatgcccagcc

SEQ ID NO: 41071 - DNA, 23 bp, Artificial Sequence
  Synthetic: FXN 3 forward 9:69043999-69044025; SpCas9
ggtgtgagctaccatgcccagcc

SEQ ID NO: 41072 - DNA, 22 bp, Artificial Sequence
  Synthetic: FXN 3 forward 9:69044000-69044025; SpCas9
gtgtgagctaccatgcccagcc

SEQ ID NO: 41073 - DNA, 21 bp, Artificial Sequence
  Synthetic: FXN 3 forward 9:69044001-69044025; SpCas9
tgtgagctaccatgcccagcc

SEQ ID NO: 41074 - DNA, 20 bp, Artificial Sequence
  Synthetic: FXN 3 forward 9:69044002-69044025; SpCas9
gtgagctaccatgcccagcc

SEQ ID NO: 41075 - DNA, 19 bp, Artificial Sequence
  Synthetic: FXN 3 forward 9:69044003-69044025; SpCas9
tgagctaccatgcccagcc

SEQ ID NO: 41076 - DNA, 18 bp, Artificial Sequence
  Synthetic: FXN 3 forward 9:69044004-69044025; SpCas9
gagctaccatgcccagcc

SEQ ID NO: 41077 - DNA, 25 bp, Artificial Sequence
  Synthetic: FXN 3 forward 9:69044002-69044030; SpCas9
gtgagctaccatgcccagccaagat

SEQ ID NO: 41078 - DNA, 24 bp, Artificial Sequence
  Synthetic: FXN 3 forward 9:69044003-69044030; SpCas9
tgagctaccatgcccagccaagat

SEQ ID NO: 41079 - DNA, 23 bp, Artificial Sequence
  Synthetic: FXN 3 forward 9:69044004-69044030; SpCas9
gagctaccatgcccagccaagat

SEQ ID NO: 41080 - DNA, 22 bp, Artificial Sequence
  Synthetic: FXN 3 forward 9:69044005-69044030; SpCas9
agctaccatgcccagccaagat

SEQ ID NO: 41081 - DNA, 21 bp, Artificial Sequence
  Synthetic: FXN 3 forward 9:69044006-69044030; SpCas9
gctaccatgcccagccaagat

SEQ ID NO: 41082 - DNA, 20 bp, Artificial Sequence
  Synthetic: FXN 3 forward 9:69044007-69044030; SpCas9
ctaccatgcccagccaagat

SEQ ID NO: 41083 - DNA, 19 bp, Artificial Sequence
  Synthetic: FXN 3 forward 9:69044008-69044030; SpCas9
taccatgcccagccaagat

SEQ ID NO: 41084 - DNA, 18 bp, Artificial Sequence
  Synthetic: FXN 3 forward 9:69044009-69044030; SpCas9
accatgcccagccaagat

SEQ ID NO: 41085 - DNA, 25 bp, Artificial Sequence
  Synthetic: FXN 3 reverse 9:69044007-69044035; SpCas9
taacactgatcttggctgggcatgg

SEQ ID NO: 41086 - DNA, 24 bp, Artificial Sequence
  Synthetic: FXN 3 reverse 9:69044008-69044035; SpCas9
aacactgatcttggctgggcatgg

SEQ ID NO: 41087 - DNA, 23 bp, Artificial Sequence
  Synthetic: FXN 3 reverse 9:69044009-69044035; SpCas9
acactgatcttggctgggcatgg

SEQ ID NO: 41088 - DNA, 22 bp, Artificial Sequence
  Synthetic: FXN 3 reverse 9:69044010-69044035; SpCas9
cactgatcttggctgggcatgg

SEQ ID NO: 41089 - DNA, 21 bp, Artificial Sequence
  Synthetic: FXN 3 reverse 9:69044011-69044035; SpCas9
actgatcttggctgggcatgg

SEQ ID NO: 41090 - DNA, 20 bp, Artificial Sequence
  Synthetic: FXN 3 reverse 9:69044012-69044035; SpCas9
ctgatcttggctgggcatgg

SEQ ID NO: 41091 - DNA, 19 bp, Artificial Sequence
  Synthetic: FXN 3 reverse 9:69044013-69044035; SpCas9
tgatcttggctgggcatgg

SEQ ID NO: 41092 - DNA, 18 bp, Artificial Sequence
  Synthetic: FXN 3 reverse 9:69044014-69044035; SpCas9
gatcttggctgggcatgg

SEQ ID NO: 41093 - DNA, 25 bp, Artificial Sequence
  Synthetic: FXN 3 reverse 9:69044010-69044038; SpCas9
cattaacactgatcttggctgggca

SEQ ID NO: 41094 - DNA, 24 bp, Artificial Sequence
  Synthetic: FXN 3 reverse 9:69044011-69044038; SpCas9
attaacactgatcttggctgggca

SEQ ID NO: 41095 - DNA, 23 bp, Artificial Sequence
  Synthetic: FXN 3 reverse 9:69044012-69044038; SpCas9
ttaacactgatcttggctgggca

SEQ ID NO: 41096 - DNA, 22 bp, Artificial Sequence
  Synthetic: FXN 3 reverse 9:69044013-69044038; SpCas9
taacactgatcttggctgggca

SEQ ID NO: 41097 - DNA, 21 bp, Artificial Sequence
  Synthetic: FXN 3 reverse 9:69044014-69044038; SpCas9
aacactgatcttggctgggca

SEQ ID NO: 41098 - DNA, 20 bp, Artificial Sequence
  Synthetic: FXN 3 reverse 9:69044015-69044038; SpCas9
acactgatcttggctgggca

SEQ ID NO: 41099 - DNA, 19 bp, Artificial Sequence
  Synthetic: FXN 3 reverse 9:69044016-69044038; SpCas9
cactgatcttggctgggca

SEQ ID NO: 41100 - DNA, 18 bp, Artificial Sequence
  Synthetic: FXN 3 reverse 9:69044017-69044038; SpCas9
actgatcttggctgggca

SEQ ID NO: 41101 - DNA, 25 bp, Artificial Sequence
  Synthetic: FXN 3 reverse 9:69044015-69044043; SpCas9
tgattcattaacactgatcttggct

SEQ ID NO: 41102 - DNA, 24 bp, Artificial Sequence
  Synthetic: FXN 3 reverse 9:69044016-69044043; SpCas9
gattcattaacactgatcttggct

SEQ ID NO: 41103 - DNA, 23 bp, Artificial Sequence
  Synthetic: FXN 3 reverse 9:69044017-69044043; SpCas9
attcattaacactgatcttggct

SEQ ID NO: 41104 - DNA, 22 bp, Artificial Sequence
  Synthetic: FXN 3 reverse 9:69044018-69044043; SpCas9
ttcattaacactgatcttggct

SEQ ID NO: 41105 - DNA, 21 bp, Artificial Sequence
  Synthetic: FXN 3 reverse 9:69044019-69044043; SpCas9
tcattaacactgatcttggct

SEQ ID NO: 41106 - DNA, 20 bp, Artificial Sequence
  Synthetic: FXN 3 reverse 9:69044020-69044043; SpCas9
cattaacactgatcttggct

SEQ ID NO: 41107 - DNA, 19 bp, Artificial Sequence
  Synthetic: FXN 3 reverse 9:69044021-69044043; SpCas9
attaacactgatcttggct

SEQ ID NO: 41108 - DNA, 18 bp, Artificial Sequence
  Synthetic: FXN 3 reverse 9:69044022-69044043; SpCas9
ttaacactgatcttggct

SEQ ID NO: 41109 - DNA, 25 bp, Artificial Sequence
  Synthetic: FXN 3 reverse 9:69044016-69044044; SpCas9
ttgattcattaacactgatcttggc

SEQ ID NO: 41110 - DNA, 24 bp, Artificial Sequence
  Synthetic: FXN 3 reverse 9:69044017-69044044; SpCas9
tgattcattaacactgatcttggc

SEQ ID NO: 41111 - DNA, 23 bp, Artificial Sequence
  Synthetic: FXN 3 reverse 9:69044018-69044044; SpCas9
gattcattaacactgatcttggc

SEQ ID NO: 41112 - DNA, 22 bp, Artificial Sequence
  Synthetic: FXN 3 reverse 9:69044019-69044044; SpCas9
attcattaacactgatcttggc

SEQ ID NO: 41113 - DNA, 21 bp, Artificial Sequence
  Synthetic: FXN 3 reverse 9:69044020-69044044; SpCas9
ttcattaacactgatcttggc

SEQ ID NO: 41114 - DNA, 20 bp, Artificial Sequence
  Synthetic: FXN 3 reverse 9:69044021-69044044; SpCas9
tcattaacactgatcttggc

SEQ ID NO: 41115 - DNA, 19 bp, Artificial Sequence
  Synthetic: FXN 3 reverse 9:69044022-69044044; SpCas9
cattaacactgatcttggc

SEQ ID NO: 41116 - DNA, 18 bp, Artificial Sequence
  Synthetic: FXN 3 reverse 9:69044023-69044044; SpCas9
attaacactgatcttggc

SEQ ID NO: 41117 - DNA, 25 bp, Artificial Sequence
  Synthetic: FXN 3 reverse 9:69044020-69044048; SpCas9
atagttgattcattaacactgatct

SEQ ID NO: 41118 - DNA, 24 bp, Artificial Sequence
  Synthetic: FXN 3 reverse 9:69044021-69044048; SpCas9
tagttgattcattaacactgatct

SEQ ID NO: 41119 - DNA, 23 bp, Artificial Sequence
  Synthetic: FXN 3 reverse 9:69044022-69044048; SpCas9
agttgattcattaacactgatct

SEQ ID NO: 41120 - DNA, 22 bp, Artificial Sequence
  Synthetic: FXN 3 reverse 9:69044023-69044048; SpCas9
gttgattcattaacactgatct

SEQ ID NO: 41121 - DNA, 21 bp, Artificial Sequence
  Synthetic: FXN 3 reverse 9:69044024-69044048; SpCas9
ttgattcattaacactgatct

SEQ ID NO: 41122 - DNA, 20 bp, Artificial Sequence
  Synthetic: FXN 3 reverse 9:69044025-69044048; SpCas9
tgattcattaacactgatct

SEQ ID NO: 41123 - DNA, 19 bp, Artificial Sequence
  Synthetic: FXN 3 reverse 9:69044026-69044048; SpCas9
gattcattaacactgatct

SEQ ID NO: 41124 - DNA, 18 bp, Artificial Sequence
  Synthetic: FXN 3 reverse 9:69044027-69044048; SpCas9
attcattaacactgatct

SEQ ID NO: 41125 - DNA, 25 bp, Artificial Sequence
  Synthetic: FXN 3 forward 9:69044034-69044062; SpCas9
aatgaatcaactatatatattacat

SEQ ID NO: 41126 - DNA, 24 bp, Artificial Sequence
  Synthetic: FXN 3 forward 9:69044035-69044062; SpCas9
atgaatcaactatatatattacat

SEQ ID NO: 41127 - DNA, 23 bp, Artificial Sequence
  Synthetic: FXN 3 forward 9:69044036-69044062; SpCas9
tgaatcaactatatatattacat

SEQ ID NO: 41128 - DNA, 22 bp, Artificial Sequence
  Synthetic: FXN 3 forward 9:69044037-69044062; SpCas9
gaatcaactatatatattacat

SEQ ID NO: 41129 - DNA, 21 bp, Artificial Sequence
  Synthetic: FXN 3 forward 9:69044038-69044062; SpCas9
aatcaactatatatattacat

SEQ ID NO: 41130 - DNA, 20 bp, Artificial Sequence
  Synthetic: FXN 3 forward 9:69044039-69044062; SpCas9
atcaactatatatattacat

SEQ ID NO: 41131 - DNA, 19 bp, Artificial Sequence
  Synthetic: FXN 3 forward 9:69044040-69044062; SpCas9
tcaactatatatattacat

SEQ ID NO: 41132 - DNA, 18 bp, Artificial Sequence
  Synthetic: FXN 3 forward 9:69044041-69044062; SpCas9
caactatatatattacat

SEQ ID NO: 41133 - DNA, 25 bp, Artificial Sequence
  Synthetic: FXN 3 forward 9:69044035-69044063; SpCas9
atgaatcaactatatatattacata

SEQ ID NO: 41134 - DNA, 24 bp, Artificial Sequence
  Synthetic: FXN 3 forward 9:69044036-69044063; SpCas9
tgaatcaactatatatattacata

SEQ ID NO: 41135 - DNA, 23 bp, Artificial Sequence
  Synthetic: FXN 3 forward 9:69044037-69044063; SpCas9
gaatcaactatatatattacata

SEQ ID NO: 41136 - DNA, 22 bp, Artificial Sequence
  Synthetic: FXN 3 forward 9:69044038-69044063; SpCas9
aatcaactatatatattacata

SEQ ID NO: 41137 - DNA, 21 bp, Artificial Sequence
  Synthetic: FXN 3 forward 9:69044039-69044063; SpCas9
atcaactatatatattacata

SEQ ID NO: 41138 - DNA, 20 bp, Artificial Sequence
  Synthetic: FXN 3 forward 9:69044040-69044063; SpCas9
tcaactatatatattacata

SEQ ID NO: 41139 - DNA, 19 bp, Artificial Sequence
  Synthetic: FXN 3 forward 9:69044041-69044063; SpCas9
caactatatatattacata

SEQ ID NO: 41140 - DNA, 18 bp, Artificial Sequence
  Synthetic: FXN 3 forward 9:69044042-69044063; SpCas9
aactatatatattacata

SEQ ID NO: 41141 - DNA, 25 bp, Artificial Sequence
  Synthetic: FXN 3 reverse 9:69044044-69044072; SpCas9
ttaaagacaccttatgtaatatata

SEQ ID NO: 41142 - DNA, 24 bp, Artificial Sequence
  Synthetic: FXN 3 reverse 9:69044045-69044072; SpCas9
taaagacaccttatgtaatatata

SEQ ID NO: 41143 - DNA, 23 bp, Artificial Sequence
  Synthetic: FXN 3 reverse 9:69044046-69044072; SpCas9
aaagacaccttatgtaatatata

SEQ ID NO: 41144 - DNA, 22 bp, Artificial Sequence
  Synthetic: FXN 3 reverse 9:69044047-69044072; SpCas9
aagacaccttatgtaatatata

SEQ ID NO: 41145 - DNA, 21 bp, Artificial Sequence
  Synthetic: FXN 3 reverse 9:69044048-69044072; SpCas9
agacaccttatgtaatatata

SEQ ID NO: 41146 - DNA, 20 bp, Artificial Sequence
  Synthetic: FXN 3 reverse 9:69044049-69044072; SpCas9
gacaccttatgtaatatata

SEQ ID NO: 41147 - DNA, 19 bp, Artificial Sequence
  Synthetic: FXN 3 reverse 9:69044050-69044072; SpCas9
acaccttatgtaatatata

SEQ ID NO: 41148 - DNA, 18 bp, Artificial Sequence
  Synthetic: FXN 3 reverse 9:69044051-69044072; SpCas9
caccttatgtaatatata

SEQ ID NO: 41149 - DNA, 25 bp, Artificial Sequence
  Synthetic: FXN 3 forward 9:69044048-69044076; SpCas9
atatattacataaggtgtctttaaa

SEQ ID NO: 41150 - DNA, 24 bp, Artificial Sequence
  Synthetic: FXN 3 forward 9:69044049-69044076; SpCas9
tatattacataaggtgtctttaaa

SEQ ID NO: 41151 - DNA, 23 bp, Artificial Sequence
  Synthetic: FXN 3 forward 9:69044050-69044076; SpCas9
atattacataaggtgtctttaaa

SEQ ID NO: 41152 - DNA, 22 bp, Artificial Sequence
  Synthetic: FXN 3 forward 9:69044051-69044076; SpCas9
tattacataaggtgtctttaaa

SEQ ID NO: 41153 - DNA, 21 bp, Artificial Sequence
  Synthetic: FXN 3 forward 9:69044052-69044076; SpCas9
attacataaggtgtctttaaa

SEQ ID NO: 41154 - DNA, 20 bp, Artificial Sequence
  Synthetic: FXN 3 forward 9:69044053-69044076; SpCas9
ttacataaggtgtctttaaa

SEQ ID NO: 41155 - DNA, 19 bp, Artificial Sequence
  Synthetic: FXN 3 forward 9:69044054-69044076; SpCas9
tacataaggtgtctttaaa

SEQ ID NO: 41156 - DNA, 18 bp, Artificial Sequence
  Synthetic: FXN 3 forward 9:69044055-69044076; SpCas9
acataaggtgtctttaaa

SEQ ID NO: 41157 - DNA, 25 bp, Artificial Sequence
  Synthetic: FXN 3 forward 9:69044055-69044083; SpCas9
acataaggtgtctttaaacagaaat

SEQ ID NO: 41158 - DNA, 24 bp, Artificial Sequence
  Synthetic: FXN 3 forward 9:69044056-69044083; SpCas9
cataaggtgtctttaaacagaaat

SEQ ID NO: 41159 - DNA, 23 bp, Artificial Sequence
  Synthetic: FXN 3 forward 9:69044057-69044083; SpCas9
ataaggtgtctttaaacagaaat

SEQ ID NO: 41160 - DNA, 22 bp, Artificial Sequence
  Synthetic: FXN 3 forward 9:69044058-69044083; SpCas9
taaggtgtctttaaacagaaat

SEQ ID NO: 41161 - DNA, 21 bp, Artificial Sequence
  Synthetic: FXN 3 forward 9:69044059-69044083; SpCas9
aaggtgtctttaaacagaaat

SEQ ID NO: 41162 - DNA, 20 bp, Artificial Sequence
  Synthetic: FXN 3 forward 9:69044060-69044083; SpCas9
aggtgtctttaaacagaaat

SEQ ID NO: 41163 - DNA, 19 bp, Artificial Sequence
  Synthetic: FXN 3 forward 9:69044061-69044083; SpCas9
ggtgtctttaaacagaaat

SEQ ID NO: 41164 - DNA, 18 bp, Artificial Sequence
  Synthetic: FXN 3 forward 9:69044062-69044083; SpCas9
gtgtctttaaacagaaat

SEQ ID NO: 41165 - DNA, 25 bp, Artificial Sequence
  Synthetic: FXN 3 forward 9:69044056-69044084; SpCas9
cataaggtgtctttaaacagaaata

SEQ ID NO: 41166 - DNA, 24 bp, Artificial Sequence
  Synthetic: FXN 3 forward 9:69044057-69044084; SpCas9
ataaggtgtctttaaacagaaata

SEQ ID NO: 41167 - DNA, 23 bp, Artificial Sequence
  Synthetic: FXN 3 forward 9:69044058-69044084; SpCas9
taaggtgtctttaaacagaaata

SEQ ID NO: 41168 - DNA, 22 bp, Artificial Sequence
  Synthetic: FXN 3 forward 9:69044059-69044084; SpCas9
aaggtgtctttaaacagaaata

SEQ ID NO: 41169 - DNA, 21 bp, Artificial Sequence
  Synthetic: FXN 3 forward 9:69044060-69044084; SpCas9
aggtgtctttaaacagaaata

SEQ ID NO: 41170 - DNA, 20 bp, Artificial Sequence
  Synthetic: FXN 3 forward 9:69044061-69044084; SpCas9
ggtgtctttaaacagaaata

SEQ ID NO: 41171 - DNA, 19 bp, Artificial Sequence
  Synthetic: FXN 3 forward 9:69044062-69044084; SpCas9
gtgtctttaaacagaaata

SEQ ID NO: 41172 - DNA, 18 bp, Artificial Sequence
  Synthetic: FXN 3 forward 9:69044063-69044084; SpCas9
tgtctttaaacagaaata

SEQ ID NO: 41173 - DNA, 25 bp, Artificial Sequence
  Synthetic: FXN 3 reverse 9:69044066-69044094; SpCas9
caatatataaccttatttctgttta

SEQ ID NO: 41174 - DNA, 24 bp, Artificial Sequence
  Synthetic: FXN 3 reverse 9:69044067-69044094; SpCas9
aatatataaccttatttctgttta

SEQ ID NO: 41175 - DNA, 23 bp, Artificial Sequence
  Synthetic: FXN 3 reverse 9:69044068-69044094; SpCas9
atatataaccttatttctgttta

SEQ ID NO: 41176 - DNA, 22 bp, Artificial Sequence
  Synthetic: FXN 3 reverse 9:69044069-69044094; SpCas9
tatataaccttatttctgttta

SEQ ID NO: 41177 - DNA, 21 bp, Artificial Sequence
  Synthetic: FXN 3 reverse 9:69044070-69044094; SpCas9
atataaccttatttctgttta

SEQ ID NO: 41178 - DNA, 20 bp, Artificial Sequence
  Synthetic: FXN 3 reverse 9:69044071-69044094; SpCas9
tataaccttatttctgttta

SEQ ID NO: 41179 - DNA, 19 bp, Artificial Sequence
  Synthetic: FXN 3 reverse 9:69044072-69044094; SpCas9
ataaccttatttctgttta

SEQ ID NO: 41180 - DNA, 18 bp, Artificial Sequence
  Synthetic: FXN 3 reverse 9:69044073-69044094; SpCas9
taaccttatttctgttta

SEQ ID NO: 41181 - DNA, 25 bp, Artificial Sequence
  Synthetic: FXN 3 forward 9:69044075-69044103; SpCas9
gaaataaggttatatattgatcgat

SEQ ID NO: 41182 - DNA, 24 bp, Artificial Sequence
  Synthetic: FXN 3 forward 9:69044076-69044103; SpCas9
aaataaggttatatattgatcgat

SEQ ID NO: 41183 - DNA, 23 bp, Artificial Sequence
  Synthetic: FXN 3 forward 9:69044077-69044103; SpCas9
aataaggttatatattgatcgat

SEQ ID NO: 41184 - DNA, 22 bp, Artificial Sequence
  Synthetic: FXN 3 forward 9:69044078-69044103; SpCas9
ataaggttatatattgatcgat

SEQ ID NO: 41185 - DNA, 21 bp, Artificial Sequence
  Synthetic: FXN 3 forward 9:69044079-69044103; SpCas9
taaggttatatattgatcgat

SEQ ID NO: 41186 - DNA, 20 bp, Artificial Sequence
  Synthetic: FXN 3 forward 9:69044080-69044103; SpCas9
aaggttatatattgatcgat

SEQ ID NO: 41187 - DNA, 19 bp, Artificial Sequence
  Synthetic: FXN 3 forward 9:69044081-69044103; SpCas9
aggttatatattgatcgat

SEQ ID NO: 41188 - DNA, 18 bp, Artificial Sequence
  Synthetic: FXN 3 forward 9:69044082-69044103; SpCas9
ggttatatattgatcgat

SEQ ID NO: 41189 - DNA, 25 bp, Artificial Sequence
  Synthetic: FXN 3 forward 9:69044093-69044121; SpCas9
gatcgattggtaacaatgttgtgac

SEQ ID NO: 41190 - DNA, 24 bp, Artificial Sequence
  Synthetic: FXN 3 forward 9:69044094-69044121; SpCas9
atcgattggtaacaatgttgtgac

SEQ ID NO: 41191 - DNA, 23 bp, Artificial Sequence
  Synthetic: FXN 3 forward 9:69044095-69044121; SpCas9
tcgattggtaacaatgttgtgac

SEQ ID NO: 41192 - DNA, 22 bp, Artificial Sequence
  Synthetic: FXN 3 forward 9:69044096-69044121; SpCas9
cgattggtaacaatgttgtgac

SEQ ID NO: 41193 - DNA, 21 bp, Artificial Sequence
  Synthetic: FXN 3 forward 9:69044097-69044121; SpCas9
gattggtaacaatgttgtgac

SEQ ID NO: 41194 - DNA, 20 bp, Artificial Sequence
  Synthetic: FXN 3 forward 9:69044098-69044121; SpCas9
attggtaacaatgttgtgac

SEQ ID NO: 41195 - DNA, 19 bp, Artificial Sequence
  Synthetic: FXN 3 forward 9:69044099-69044121; SpCas9
ttggtaacaatgttgtgac

SEQ ID NO: 41196 - DNA, 18 bp, Artificial Sequence
  Synthetic: FXN 3 forward 9:69044100-69044121; SpCas9
tggtaacaatgttgtgac

SEQ ID NO: 41197 - DNA, 25 bp, Artificial Sequence
  Synthetic: FXN 3 forward 9:69044096-69044124; SpCas9
cgattggtaacaatgttgtgaccag

SEQ ID NO: 41198 - DNA, 24 bp, Artificial Sequence
  Synthetic: FXN 3 forward 9:69044097-69044124; SpCas9
gattggtaacaatgttgtgaccag

SEQ ID NO: 41199 - DNA, 23 bp, Artificial Sequence
  Synthetic: FXN 3 forward 9:69044098-69044124; SpCas9
attggtaacaatgttgtgaccag

SEQ ID NO: 41200 - DNA, 22 bp, Artificial Sequence
  Synthetic: FXN 3 forward 9:69044099-69044124; SpCas9
ttggtaacaatgttgtgaccag

SEQ ID NO: 41201 - DNA, 21 bp, Artificial Sequence
  Synthetic: FXN 3 forward 9:69044100-69044124; SpCas9
tggtaacaatgttgtgaccag

SEQ ID NO: 41202 - DNA, 20 bp, Artificial Sequence
  Synthetic: FXN 3 forward 9:69044101-69044124; SpCas9
ggtaacaatgttgtgaccag

SEQ ID NO: 41203 - DNA, 19 bp, Artificial Sequence
  Synthetic: FXN 3 forward 9:69044102-69044124; SpCas9
gtaacaatgttgtgaccag

SEQ ID NO: 41204 - DNA, 18 bp, Artificial Sequence
  Synthetic: FXN 3 forward 9:69044103-69044124; SpCas9
taacaatgttgtgaccag

SEQ ID NO: 41205 - DNA, 25 bp, Artificial Sequence
  Synthetic: FXN 3 forward 9:69044103-69044131; SpCas9
taacaatgttgtgaccagcagctta

SEQ ID NO: 41206 - DNA, 24 bp, Artificial Sequence
  Synthetic: FXN 3 forward 9:69044104-69044131; SpCas9
aacaatgttgtgaccagcagctta

SEQ ID NO: 41207 - DNA, 23 bp, Artificial Sequence
  Synthetic: FXN 3 forward 9:69044105-69044131; SpCas9
acaatgttgtgaccagcagctta

SEQ ID NO: 41208 - DNA, 22 bp, Artificial Sequence
  Synthetic: FXN 3 forward 9:69044106-69044131; SpCas9
caatgttgtgaccagcagctta

SEQ ID NO: 41209 - DNA, 21 bp, Artificial Sequence
  Synthetic: FXN 3 forward 9:69044107-69044131; SpCas9
aatgttgtgaccagcagctta

SEQ ID NO: 41210 - DNA, 20 bp, Artificial Sequence
  Synthetic: FXN 3 forward 9:69044108-69044131; SpCas9
atgttgtgaccagcagctta

SEQ ID NO: 41211 - DNA, 19 bp, Artificial Sequence
  Synthetic: FXN 3 forward 9:69044109-69044131; SpCas9
tgttgtgaccagcagctta

SEQ ID NO: 41212 - DNA, 18 bp, Artificial Sequence
  Synthetic: FXN 3 forward 9:69044110-69044131; SpCas9
gttgtgaccagcagctta

SEQ ID NO: 41213 - DNA, 25 bp, Artificial Sequence
  Synthetic: FXN 3 forward 9:69044104-69044132; SpCas9
aacaatgttgtgaccagcagcttac

SEQ ID NO: 41214 - DNA, 24 bp, Artificial Sequence
  Synthetic: FXN 3 forward 9:69044105-69044132; SpCas9
acaatgttgtgaccagcagcttac

SEQ ID NO: 41215 - DNA, 23 bp, Artificial Sequence
  Synthetic: FXN 3 forward 9:69044106-69044132; SpCas9
caatgttgtgaccagcagcttac

SEQ ID NO: 41216 - DNA, 22 bp, Artificial Sequence
  Synthetic: FXN 3 forward 9:69044107-69044132; SpCas9
aatgttgtgaccagcagcttac

SEQ ID NO: 41217 - DNA, 21 bp, Artificial Sequence
  Synthetic: FXN 3 forward 9:69044108-69044132; SpCas9
atgttgtgaccagcagcttac

SEQ ID NO: 41218 - DNA, 20 bp, Artificial Sequence
  Synthetic: FXN 3 forward 9:69044109-69044132; SpCas9
tgttgtgaccagcagcttac

SEQ ID NO: 41219 - DNA, 19 bp, Artificial Sequence
  Synthetic: FXN 3 forward 9:69044110-69044132; SpCas9
gttgtgaccagcagcttac

SEQ ID NO: 41220 - DNA, 18 bp, Artificial Sequence
  Synthetic: FXN 3 forward 9:69044111-69044132; SpCas9
ttgtgaccagcagcttac

SEQ ID NO: 41221 - DNA, 25 bp, Artificial Sequence
  Synthetic: FXN 3 forward 9:69044105-69044133; SpCas9
acaatgttgtgaccagcagcttaca

SEQ ID NO: 41222 - DNA, 24 bp, Artificial Sequence
  Synthetic: FXN 3 forward 9:69044106-69044133; SpCas9
caatgttgtgaccagcagcttaca

SEQ ID NO: 41223 - DNA, 23 bp, Artificial Sequence
  Synthetic: FXN 3 forward 9:69044107-69044133; SpCas9
aatgttgtgaccagcagcttaca

SEQ ID NO: 41224 - DNA, 22 bp, Artificial Sequence
  Synthetic: FXN 3 forward 9:69044108-69044133; SpCas9
atgttgtgaccagcagcttaca

SEQ ID NO: 41225 - DNA, 21 bp, Artificial Sequence
  Synthetic: FXN 3 forward 9:69044109-69044133; SpCas9
tgttgtgaccagcagcttaca

SEQ ID NO: 41226 - DNA, 20 bp, Artificial Sequence
  Synthetic: FXN 3 forward 9:69044110-69044133; SpCas9
gttgtgaccagcagcttaca

SEQ ID NO: 41227 - DNA, 19 bp, Artificial Sequence
  Synthetic: FXN 3 forward 9:69044111-69044133; SpCas9
ttgtgaccagcagcttaca

SEQ ID NO: 41228 - DNA, 18 bp, Artificial Sequence
  Synthetic: FXN 3 forward 9:69044112-69044133; SpCas9
tgtgaccagcagcttaca

SEQ ID NO: 41229 - DNA, 25 bp, Artificial Sequence
  Synthetic: FXN 3 forward 9:69044112-69044140; SpCas9
tgtgaccagcagcttacagggtacc

SEQ ID NO: 41230 - DNA, 24 bp, Artificial Sequence
  Synthetic: FXN 3 forward 9:69044113-69044140; SpCas9
gtgaccagcagcttacagggtacc

SEQ ID NO: 41231 - DNA, 23 bp, Artificial Sequence
  Synthetic: FXN 3 forward 9:69044114-69044140; SpCas9
tgaccagcagcttacagggtacc

SEQ ID NO: 41232 - DNA, 22 bp, Artificial Sequence
  Synthetic: FXN 3 forward 9:69044115-69044140; SpCas9
gaccagcagcttacagggtacc

SEQ ID NO: 41233 - DNA, 21 bp, Artificial Sequence
  Synthetic: FXN 3 forward 9:69044116-69044140; SpCas9
accagcagcttacagggtacc

SEQ ID NO: 41234 - DNA, 20 bp, Artificial Sequence
  Synthetic: FXN 3 forward 9:69044117-69044140; SpCas9
ccagcagcttacagggtacc

SEQ ID NO: 41235 - DNA, 19 bp, Artificial Sequence
  Synthetic: FXN 3 forward 9:69044118-69044140; SpCas9
cagcagcttacagggtacc

SEQ ID NO: 41236 - DNA, 18 bp, Artificial Sequence
  Synthetic: FXN 3 forward 9:69044119-69044140; SpCas9
agcagcttacagggtacc

SEQ ID NO: 41237 - DNA, 25 bp, Artificial Sequence
  Synthetic: FXN 3 reverse 9:69044117-69044145; SpCas9
caaggctaggtaccctgtaagctgc

SEQ ID NO: 41238 - DNA, 24 bp, Artificial Sequence
  Synthetic: FXN 3 reverse 9:69044118-69044145; SpCas9
aaggctaggtaccctgtaagctgc

SEQ ID NO: 41239 - DNA, 23 bp, Artificial Sequence
  Synthetic: FXN 3 reverse 9:69044119-69044145; SpCas9
aggctaggtaccctgtaagctgc

SEQ ID NO: 41240 - DNA, 22 bp, Artificial Sequence
  Synthetic: FXN 3 reverse 9:69044120-69044145; SpCas9
ggctaggtaccctgtaagctgc

SEQ ID NO: 41241 - DNA, 21 bp, Artificial Sequence
  Synthetic: FXN 3 reverse 9:69044121-69044145; SpCas9
gctaggtaccctgtaagctgc

SEQ ID NO: 41242 - DNA, 20 bp, Artificial Sequence
  Synthetic: FXN 3 reverse 9:69044122-69044145; SpCas9
ctaggtaccctgtaagctgc

SEQ ID NO: 41243 - DNA, 19 bp, Artificial Sequence
  Synthetic: FXN 3 reverse 9:69044123-69044145; SpCas9
taggtaccctgtaagctgc

SEQ ID NO: 41244 - DNA, 18 bp, Artificial Sequence
  Synthetic: FXN 3 reverse 9:69044124-69044145; SpCas9
aggtaccctgtaagctgc

SEQ ID NO: 41245 - DNA, 25 bp, Artificial Sequence
  Synthetic: FXN 3 reverse 9:69044124-69044152; SpCas9
agaaatacaaggctaggtaccctgt

SEQ ID NO: 41246 - DNA, 24 bp, Artificial Sequence
  Synthetic: FXN 3 reverse 9:69044125-69044152; SpCas9
gaaatacaaggctaggtaccctgt

SEQ ID NO: 41247 - DNA, 23 bp, Artificial Sequence
  Synthetic: FXN 3 reverse 9:69044126-69044152; SpCas9
aaatacaaggctaggtaccctgt

SEQ ID NO: 41248 - DNA, 22 bp, Artificial Sequence
  Synthetic: FXN 3 reverse 9:69044127-69044152; SpCas9
aatacaaggctaggtaccctgt

SEQ ID NO: 41249 - DNA, 21 bp, Artificial Sequence
  Synthetic: FXN 3 reverse 9:69044128-69044152; SpCas9
atacaaggctaggtaccctgt

SEQ ID NO: 41250 - DNA, 20 bp, Artificial Sequence
  Synthetic: FXN 3 reverse 9:69044129-69044152; SpCas9
tacaaggctaggtaccctgt

SEQ ID NO: 41251 - DNA, 19 bp, Artificial Sequence
  Synthetic: FXN 3 reverse 9:69044130-69044152; SpCas9
acaaggctaggtaccctgt

SEQ ID NO: 41252 - DNA, 18 bp, Artificial Sequence
  Synthetic: FXN 3 reverse 9:69044131-69044152; SpCas9
caaggctaggtaccctgt

SEQ ID NO: 41253 - DNA, 25 bp, Artificial Sequence
  Synthetic: FXN 3 reverse 9:69044135-69044163; SpCas9
ttatttataggagaaatacaaggct

SEQ ID NO: 41254 - DNA, 24 bp, Artificial Sequence
  Synthetic: FXN 3 reverse 9:69044136-69044163; SpCas9
tatttataggagaaatacaaggct

SEQ ID NO: 41255 - DNA, 23 bp, Artificial Sequence
  Synthetic: FXN 3 reverse 9:69044137-69044163; SpCas9
atttataggagaaatacaaggct

SEQ ID NO: 41256 - DNA, 22 bp, Artificial Sequence
  Synthetic: FXN 3 reverse 9:69044138-69044163; SpCas9
tttataggagaaatacaaggct

SEQ ID NO: 41257 - DNA, 21 bp, Artificial Sequence
  Synthetic: FXN 3 reverse 9:69044139-69044163; SpCas9
ttataggagaaatacaaggct

SEQ ID NO: 41258 - DNA, 20 bp, Artificial Sequence
  Synthetic: FXN 3 reverse 9:69044140-69044163; SpCas9
tataggagaaatacaaggct

SEQ ID NO: 41259 - DNA, 19 bp, Artificial Sequence
  Synthetic: FXN 3 reverse 9:69044141-69044163; SpCas9
ataggagaaatacaaggct

SEQ ID NO: 41260 - DNA, 18 bp, Artificial Sequence
  Synthetic: FXN 3 reverse 9:69044142-69044163; SpCas9
taggagaaatacaaggct

SEQ ID NO: 41261 - DNA, 25 bp, Artificial Sequence
  Synthetic: FXN 3 reverse 9:69044136-69044164; SpCas9
attatttataggagaaatacaaggc

SEQ ID NO: 41262 - DNA, 24 bp, Artificial Sequence
  Synthetic: FXN 3 reverse 9:69044137-69044164; SpCas9
ttatttataggagaaatacaaggc

SEQ ID NO: 41263 - DNA, 23 bp, Artificial Sequence
  Synthetic: FXN 3 reverse 9:69044138-69044164; SpCas9
tatttataggagaaatacaaggc

SEQ ID NO: 41264 - DNA, 22 bp, Artificial Sequence
  Synthetic: FXN 3 reverse 9:69044139-69044164; SpCas9
atttataggagaaatacaaggc

SEQ ID NO: 41265 - DNA, 21 bp, Artificial Sequence
  Synthetic: FXN 3 reverse 9:69044140-69044164; SpCas9
tttataggagaaatacaaggc

SEQ ID NO: 41266 - DNA, 20 bp, Artificial Sequence
  Synthetic: FXN 3 reverse 9:69044141-69044164; SpCas9
ttataggagaaatacaaggc

SEQ ID NO: 41267 - DNA, 19 bp, Artificial Sequence
  Synthetic: FXN 3 reverse 9:69044142-69044164; SpCas9
tataggagaaatacaaggc

SEQ ID NO: 41268 - DNA, 18 bp, Artificial Sequence
  Synthetic: FXN 3 reverse 9:69044143-69044164; SpCas9
ataggagaaatacaaggc

SEQ ID NO: 41269 - DNA, 25 bp, Artificial Sequence
  Synthetic: FXN 3 reverse 9:69044140-69044168; SpCas9
gcaaattatttataggagaaataca

SEQ ID NO: 41270 - DNA, 24 bp, Artificial Sequence
  Synthetic: FXN 3 reverse 9:69044141-69044168; SpCas9
caaattatttataggagaaataca

SEQ ID NO: 41271 - DNA, 23 bp, Artificial Sequence
  Synthetic: FXN 3 reverse 9:69044142-69044168; SpCas9
aaattatttataggagaaataca

SEQ ID NO: 41272 - DNA, 22 bp, Artificial Sequence
  Synthetic: FXN 3 reverse 9:69044143-69044168; SpCas9
aattatttataggagaaataca

SEQ ID NO: 41273 - DNA, 21 bp, Artificial Sequence
  Synthetic: FXN 3 reverse 9:69044144-69044168; SpCas9
attatttataggagaaataca

SEQ ID NO: 41274 - DNA, 20 bp, Artificial Sequence
  Synthetic: FXN 3 reverse 9:69044145-69044168; SpCas9
ttatttataggagaaataca

SEQ ID NO: 41275 - DNA, 19 bp, Artificial Sequence
  Synthetic: FXN 3 reverse 9:69044146-69044168; SpCas9
tatttataggagaaataca

SEQ ID NO: 41276 - DNA, 18 bp, Artificial Sequence
  Synthetic: FXN 3 reverse 9:69044147-69044168; SpCas9
atttataggagaaataca

SEQ ID NO: 41277 - DNA, 25 bp, Artificial Sequence
  Synthetic: FXN 3 reverse 9:69044141-69044169; SpCas9
agcaaattatttataggagaaatac

SEQ ID NO: 41278 - DNA, 24 bp, Artificial Sequence
  Synthetic: FXN 3 reverse 9:69044142-69044169; SpCas9
gcaaattatttataggagaaatac

SEQ ID NO: 41279 - DNA, 23 bp, Artificial Sequence
  Synthetic: FXN 3 reverse 9:69044143-69044169; SpCas9
caaattatttataggagaaatac

SEQ ID NO: 41280 - DNA, 22 bp, Artificial Sequence
  Synthetic: FXN 3 reverse 9:69044144-69044169; SpCas9
aaattatttataggagaaatac

SEQ ID NO: 41281 - DNA, 21 bp, Artificial Sequence
  Synthetic: FXN 3 reverse 9:69044145-69044169; SpCas9
aattatttataggagaaatac

SEQ ID NO: 41282 - DNA, 20 bp, Artificial Sequence
  Synthetic: FXN 3 reverse 9:69044146-69044169; SpCas9
attatttataggagaaatac

SEQ ID NO: 41283 - DNA, 19 bp, Artificial Sequence
  Synthetic: FXN 3 reverse 9:69044147-69044169; SpCas9
ttatttataggagaaatac

SEQ ID NO: 41284 - DNA, 18 bp, Artificial Sequence
  Synthetic: FXN 3 reverse 9:69044148-69044169; SpCas9
tatttataggagaaatac

SEQ ID NO: 41285 - DNA, 25 bp, Artificial Sequence
  Synthetic: FXN 3 forward 9:69044148-69044176; SpCas9
ttctcctataaataatttgctcgtt

SEQ ID NO: 41286 - DNA, 24 bp, Artificial Sequence
  Synthetic: FXN 3 forward 9:69044149-69044176; SpCas9
tctcctataaataatttgctcgtt

SEQ ID NO: 41287 - DNA, 23 bp, Artificial Sequence
  Synthetic: FXN 3 forward 9:69044150-69044176; SpCas9
ctcctataaataatttgctcgtt

SEQ ID NO: 41288 - DNA, 22 bp, Artificial Sequence
  Synthetic: FXN 3 forward 9:69044151-69044176; SpCas9
tcctataaataatttgctcgtt

SEQ ID NO: 41289 - DNA, 21 bp, Artificial Sequence
  Synthetic: FXN 3 forward 9:69044152-69044176; SpCas9
cctataaataatttgctcgtt

SEQ ID NO: 41290 - DNA, 20 bp, Artificial Sequence
  Synthetic: FXN 3 forward 9:69044153-69044176; SpCas9
ctataaataatttgctcgtt

SEQ ID NO: 41291 - DNA, 19 bp, Artificial Sequence
  Synthetic: FXN 3 forward 9:69044154-69044176; SpCas9
tataaataatttgctcgtt

SEQ ID NO: 41292 - DNA, 18 bp, Artificial Sequence
  Synthetic: FXN 3 forward 9:69044155-69044176; SpCas9
ataaataatttgctcgtt

SEQ ID NO: 41293 - DNA, 25 bp, Artificial Sequence
  Synthetic: FXN 3 reverse 9:69044150-69044178; SpCas9
cactcaacgagcaaattatttatag

SEQ ID NO: 41294 - DNA, 24 bp, Artificial Sequence
  Synthetic: FXN 3 reverse 9:69044151-69044178; SpCas9
actcaacgagcaaattatttatag

SEQ ID NO: 41295 - DNA, 23 bp, Artificial Sequence
  Synthetic: FXN 3 reverse 9:69044152-69044178; SpCas9
ctcaacgagcaaattatttatag

SEQ ID NO: 41296 - DNA, 22 bp, Artificial Sequence
  Synthetic: FXN 3 reverse 9:69044153-69044178; SpCas9
tcaacgagcaaattatttatag

SEQ ID NO: 41297 - DNA, 21 bp, Artificial Sequence
  Synthetic: FXN 3 reverse 9:69044154-69044178; SpCas9
caacgagcaaattatttatag

SEQ ID NO: 41298 - DNA, 20 bp, Artificial Sequence
  Synthetic: FXN 3 reverse 9:69044155-69044178; SpCas9
aacgagcaaattatttatag

SEQ ID NO: 41299 - DNA, 19 bp, Artificial Sequence
  Synthetic: FXN 3 reverse 9:69044156-69044178; SpCas9
acgagcaaattatttatag

SEQ ID NO: 41300 - DNA, 18 bp, Artificial Sequence
  Synthetic: FXN 3 reverse 9:69044157-69044178; SpCas9
cgagcaaattatttatag

SEQ ID NO: 41301 - DNA, 25 bp, Artificial Sequence
  Synthetic: FXN 3 reverse 9:69044152-69044180; SpCas9
aacactcaacgagcaaattatttat

SEQ ID NO: 41302 - DNA, 24 bp, Artificial Sequence
  Synthetic: FXN 3 reverse 9:69044153-69044180; SpCas9
acactcaacgagcaaattatttat

SEQ ID NO: 41303 - DNA, 23 bp, Artificial Sequence
  Synthetic: FXN 3 reverse 9:69044154-69044180; SpCas9
cactcaacgagcaaattatttat

SEQ ID NO: 41304 - DNA, 22 bp, Artificial Sequence
  Synthetic: FXN 3 reverse 9:69044155-69044180; SpCas9
actcaacgagcaaattatttat

SEQ ID NO: 41305 - DNA, 21 bp, Artificial Sequence
  Synthetic: FXN 3 reverse 9:69044156-69044180; SpCas9
ctcaacgagcaaattatttat

SEQ ID NO: 41306 - DNA, 20 bp, Artificial Sequence
  Synthetic: FXN 3 reverse 9:69044157-69044180; SpCas9
tcaacgagcaaattatttat

SEQ ID NO: 41307 - DNA, 19 bp, Artificial Sequence
  Synthetic: FXN 3 reverse 9:69044158-69044180; SpCas9
caacgagcaaattatttat

SEQ ID NO: 41308 - DNA, 18 bp, Artificial Sequence
  Synthetic: FXN 3 reverse 9:69044159-69044180; SpCas9
aacgagcaaattatttat

SEQ ID NO: 41309 - DNA, 25 bp, Artificial Sequence
  Synthetic: FXN 3 reverse 9:69044153-69044181; SpCas9
aaacactcaacgagcaaattattta

SEQ ID NO: 41310 - DNA, 24 bp, Artificial Sequence
  Synthetic: FXN 3 reverse 9:69044154-69044181; SpCas9
aacactcaacgagcaaattattta

SEQ ID NO: 41311 - DNA, 23 bp, Artificial Sequence
  Synthetic: FXN 3 reverse 9:69044155-69044181; SpCas9
acactcaacgagcaaattattta

SEQ ID NO: 41312 - DNA, 22 bp, Artificial Sequence
  Synthetic: FXN 3 reverse 9:69044156-69044181; SpCas9
cactcaacgagcaaattattta

SEQ ID NO: 41313 - DNA, 21 bp, Artificial Sequence
  Synthetic: FXN 3 reverse 9:69044157-69044181; SpCas9
actcaacgagcaaattattta

SEQ ID NO: 41314 - DNA, 20 bp, Artificial Sequence
  Synthetic: FXN 3 reverse 9:69044158-69044181; SpCas9
ctcaacgagcaaattattta

SEQ ID NO: 41315 - DNA, 19 bp, Artificial Sequence
  Synthetic: FXN 3 reverse 9:69044159-69044181; SpCas9
tcaacgagcaaattattta

SEQ ID NO: 41316 - DNA, 18 bp, Artificial Sequence
  Synthetic: FXN 3 reverse 9:69044160-69044181; SpCas9
caacgagcaaattattta

SEQ ID NO: 41317 - DNA, 25 bp, Artificial Sequence
  Synthetic: FXN 3 forward 9:69044157-69044185; SpCas9
aaataatttgctcgttgagtgtttg

SEQ ID NO: 41318 - DNA, 24 bp, Artificial Sequence
  Synthetic: FXN 3 forward 9:69044158-69044185; SpCas9
aataatttgctcgttgagtgtttg

SEQ ID NO: 41319 - DNA, 23 bp, Artificial Sequence
  Synthetic: FXN 3 forward 9:69044159-69044185; SpCas9
ataatttgctcgttgagtgtttg

SEQ ID NO: 41320 - DNA, 22 bp, Artificial Sequence
  Synthetic: FXN 3 forward 9:69044160-69044185; SpCas9
taatttgctcgttgagtgtttg

SEQ ID NO: 41321 - DNA, 21 bp, Artificial Sequence
  Synthetic: FXN 3 forward 9:69044161-69044185; SpCas9
aatttgctcgttgagtgtttg

SEQ ID NO: 41322 - DNA, 20 bp, Artificial Sequence
  Synthetic: FXN 3 forward 9:69044162-69044185; SpCas9
atttgctcgttgagtgtttg

SEQ ID NO: 41323 - DNA, 19 bp, Artificial Sequence
  Synthetic: FXN 3 forward 9:69044163-69044185; SpCas9
tttgctcgttgagtgtttg

SEQ ID NO: 41324 - DNA, 18 bp, Artificial Sequence
  Synthetic: FXN 3 forward 9:69044164-69044185; SpCas9
ttgctcgttgagtgtttg

SEQ ID NO: 41325 - DNA, 25 bp, Artificial Sequence
  Synthetic: FXN 3 reverse 9:69044167-69044195; SpCas9
tacaaagttgccacaaacactcaac

SEQ ID NO: 41326 - DNA, 24 bp, Artificial Sequence
  Synthetic: FXN 3 reverse 9:69044168-69044195; SpCas9
acaaagttgccacaaacactcaac

SEQ ID NO: 41327 - DNA, 23 bp, Artificial Sequence
  Synthetic: FXN 3 reverse 9:69044169-69044195; SpCas9
caaagttgccacaaacactcaac

SEQ ID NO: 41328 - DNA, 22 bp, Artificial Sequence
  Synthetic: FXN 3 reverse 9:69044170-69044195; SpCas9
aaagttgccacaaacactcaac

SEQ ID NO: 41329 - DNA, 21 bp, Artificial Sequence
  Synthetic: FXN 3 reverse 9:69044171-69044195; SpCas9
aagttgccacaaacactcaac

SEQ ID NO: 41330 - DNA, 20 bp, Artificial Sequence
  Synthetic: FXN 3 reverse 9:69044172-69044195; SpCas9
agttgccacaaacactcaac

SEQ ID NO: 41331 - DNA, 19 bp, Artificial Sequence
  Synthetic: FXN 3 reverse 9:69044173-69044195; SpCas9
gttgccacaaacactcaac

SEQ ID NO: 41332 - DNA, 18 bp, Artificial Sequence
  Synthetic: FXN 3 reverse 9:69044174-69044195; SpCas9
ttgccacaaacactcaac

SEQ ID NO: 41333 - DNA, 25 bp, Artificial Sequence
  Synthetic: FXN 3 forward 9:69044168-69044196; SpCas9
tcgttgagtgtttgtggcaactttg

SEQ ID NO: 41334 - DNA, 24 bp, Artificial Sequence
  Synthetic: FXN 3 forward 9:69044169-69044196; SpCas9
cgttgagtgtttgtggcaactttg

SEQ ID NO: 41335 - DNA, 23 bp, Artificial Sequence
  Synthetic: FXN 3 forward 9:69044170-69044196; SpCas9
gttgagtgtttgtggcaactttg

SEQ ID NO: 41336 - DNA, 22 bp, Artificial Sequence
  Synthetic: FXN 3 forward 9:69044171-69044196; SpCas9
ttgagtgtttgtggcaactttg

SEQ ID NO: 41337 - DNA, 21 bp, Artificial Sequence
  Synthetic: FXN 3 forward 9:69044172-69044196; SpCas9
tgagtgtttgtggcaactttg

SEQ ID NO: 41338 - DNA, 20 bp, Artificial Sequence
  Synthetic: FXN 3 forward 9:69044173-69044196; SpCas9
gagtgtttgtggcaactttg

SEQ ID NO: 41339 - DNA, 19 bp, Artificial Sequence
  Synthetic: FXN 3 forward 9:69044174-69044196; SpCas9
agtgtttgtggcaactttg

SEQ ID NO: 41340 - DNA, 18 bp, Artificial Sequence
  Synthetic: FXN 3 forward 9:69044175-69044196; SpCas9
gtgtttgtggcaactttg

SEQ ID NO: 41341 - DNA, 25 bp, Artificial Sequence
  Synthetic: FXN 3 forward 9:69044183-69044211; SpCas9
ggcaactttgtagcacataactacc

SEQ ID NO: 41342 - DNA, 24 bp, Artificial Sequence
  Synthetic: FXN 3 forward 9:69044184-69044211; SpCas9
gcaactttgtagcacataactacc

SEQ ID NO: 41343 - DNA, 23 bp, Artificial Sequence
  Synthetic: FXN 3 forward 9:69044185-69044211; SpCas9
caactttgtagcacataactacc

SEQ ID NO: 41344 - DNA, 22 bp, Artificial Sequence
  Synthetic: FXN 3 forward 9:69044186-69044211; SpCas9
aactttgtagcacataactacc

SEQ ID NO: 41345 - DNA, 21 bp, Artificial Sequence
  Synthetic: FXN 3 forward 9:69044187-69044211; SpCas9
actttgtagcacataactacc

SEQ ID NO: 41346 - DNA, 20 bp, Artificial Sequence
  Synthetic: FXN 3 forward 9:69044188-69044211; SpCas9
ctttgtagcacataactacc

SEQ ID NO: 41347 - DNA, 19 bp, Artificial Sequence
  Synthetic: FXN 3 forward 9:69044189-69044211; SpCas9
tttgtagcacataactacc

SEQ ID NO: 41348 - DNA, 18 bp, Artificial Sequence
  Synthetic: FXN 3 forward 9:69044190-69044211; SpCas9
ttgtagcacataactacc

SEQ ID NO: 41349 - DNA, 25 bp, Artificial Sequence
  Synthetic: FXN 3 reverse 9:69044188-69044216; SpCas9
ttattcttggtagttatgtgctaca

SEQ ID NO: 41350 - DNA, 24 bp, Artificial Sequence
  Synthetic: FXN 3 reverse 9:69044189-69044216; SpCas9
tattcttggtagttatgtgctaca

SEQ ID NO: 41351 - DNA, 23 bp, Artificial Sequence
  Synthetic: FXN 3 reverse 9:69044190-69044216; SpCas9
attcttggtagttatgtgctaca

SEQ ID NO: 41352 - DNA, 22 bp, Artificial Sequence
  Synthetic: FXN 3 reverse 9:69044191-69044216; SpCas9
ttcttggtagttatgtgctaca

SEQ ID NO: 41353 - DNA, 21 bp, Artificial Sequence
  Synthetic: FXN 3 reverse 9:69044192-69044216; SpCas9
tcttggtagttatgtgctaca

SEQ ID NO: 41354 - DNA, 20 bp, Artificial Sequence
  Synthetic: FXN 3 reverse 9:69044193-69044216; SpCas9
cttggtagttatgtgctaca

SEQ ID NO: 41355 - DNA, 19 bp, Artificial Sequence
  Synthetic: FXN 3 reverse 9:69044194-69044216; SpCas9
ttggtagttatgtgctaca

SEQ ID NO: 41356 - DNA, 18 bp, Artificial Sequence
  Synthetic: FXN 3 reverse 9:69044195-69044216; SpCas9
tggtagttatgtgctaca

SEQ ID NO: 41357 - DNA, 25 bp, Artificial Sequence
  Synthetic: FXN 3 forward 9:69044189-69044217; SpCas9
tttgtagcacataactaccaagaat

SEQ ID NO: 41358 - DNA, 24 bp, Artificial Sequence
  Synthetic: FXN 3 forward 9:69044190-69044217; SpCas9
ttgtagcacataactaccaagaat

SEQ ID NO: 41359 - DNA, 23 bp, Artificial Sequence
  Synthetic: FXN 3 forward 9:69044191-69044217; SpCas9
tgtagcacataactaccaagaat

SEQ ID NO: 41360 - DNA, 22 bp, Artificial Sequence
  Synthetic: FXN 3 forward 9:69044192-69044217; SpCas9
gtagcacataactaccaagaat

SEQ ID NO: 41361 - DNA, 21 bp, Artificial Sequence
  Synthetic: FXN 3 forward 9:69044193-69044217; SpCas9
tagcacataactaccaagaat

SEQ ID NO: 41362 - DNA, 20 bp, Artificial Sequence
  Synthetic: FXN 3 forward 9:69044194-69044217; SpCas9
agcacataactaccaagaat

SEQ ID NO: 41363 - DNA, 19 bp, Artificial Sequence
  Synthetic: FXN 3 forward 9:69044195-69044217; SpCas9
gcacataactaccaagaat

SEQ ID NO: 41364 - DNA, 18 bp, Artificial Sequence
  Synthetic: FXN 3 forward 9:69044196-69044217; SpCas9
cacataactaccaagaat

SEQ ID NO: 41365 - DNA, 25 bp, Artificial Sequence
  Synthetic: FXN 3 forward 9:69044190-69044218; SpCas9
ttgtagcacataactaccaagaata

SEQ ID NO: 41366 - DNA, 24 bp, Artificial Sequence
  Synthetic: FXN 3 forward 9:69044191-69044218; SpCas9
tgtagcacataactaccaagaata

SEQ ID NO: 41367 - DNA, 23 bp, Artificial Sequence
  Synthetic: FXN 3 forward 9:69044192-69044218; SpCas9
gtagcacataactaccaagaata

SEQ ID NO: 41368 - DNA, 22 bp, Artificial Sequence
  Synthetic: FXN 3 forward 9:69044193-69044218; SpCas9
tagcacataactaccaagaata

SEQ ID NO: 41369 - DNA, 21 bp, Artificial Sequence
  Synthetic: FXN 3 forward 9:69044194-69044218; SpCas9
agcacataactaccaagaata

SEQ ID NO: 41370 - DNA, 20 bp, Artificial Sequence
  Synthetic: FXN 3 forward 9:69044195-69044218; SpCas9
gcacataactaccaagaata

SEQ ID NO: 41371 - DNA, 19 bp, Artificial Sequence
  Synthetic: FXN 3 forward 9:69044196-69044218; SpCas9
cacataactaccaagaata

SEQ ID NO: 41372 - DNA, 18 bp, Artificial Sequence
  Synthetic: FXN 3 forward 9:69044197-69044218; SpCas9
acataactaccaagaata

SEQ ID NO: 41373 - DNA, 25 bp, Artificial Sequence
  Synthetic: FXN 3 forward 9:69044201-69044229; SpCas9
aactaccaagaataaggactgtaat

SEQ ID NO: 41374 - DNA, 24 bp, Artificial Sequence
  Synthetic: FXN 3 forward 9:69044202-69044229; SpCas9
actaccaagaataaggactgtaat

SEQ ID NO: 41375 - DNA, 23 bp, Artificial Sequence
  Synthetic: FXN 3 forward 9:69044203-69044229; SpCas9
ctaccaagaataaggactgtaat

SEQ ID NO: 41376 - DNA, 22 bp, Artificial Sequence
  Synthetic: FXN 3 forward 9:69044204-69044229; SpCas9
taccaagaataaggactgtaat

SEQ ID NO: 41377 - DNA, 21 bp, Artificial Sequence
  Synthetic: FXN 3 forward 9:69044205-69044229; SpCas9
accaagaataaggactgtaat

SEQ ID NO: 41378 - DNA, 20 bp, Artificial Sequence
  Synthetic: FXN 3 forward 9:69044206-69044229; SpCas9
ccaagaataaggactgtaat

SEQ ID NO: 41379 - DNA, 19 bp, Artificial Sequence
  Synthetic: FXN 3 forward 9:69044207-69044229; SpCas9
caagaataaggactgtaat

SEQ ID NO: 41380 - DNA, 18 bp, Artificial Sequence
  Synthetic: FXN 3 forward 9:69044208-69044229; SpCas9
aagaataaggactgtaat

SEQ ID NO: 41381 - DNA, 25 bp, Artificial Sequence
  Synthetic: FXN 3 forward 9:69044203-69044231; SpCas9
ctaccaagaataaggactgtaataa

SEQ ID NO: 41382 - DNA, 24 bp, Artificial Sequence
  Synthetic: FXN 3 forward 9:69044204-69044231; SpCas9
taccaagaataaggactgtaataa

SEQ ID NO: 41383 - DNA, 23 bp, Artificial Sequence
  Synthetic: FXN 3 forward 9:69044205-69044231; SpCas9
accaagaataaggactgtaataa

SEQ ID NO: 41384 - DNA, 22 bp, Artificial Sequence
  Synthetic: FXN 3 forward 9:69044206-69044231; SpCas9
ccaagaataaggactgtaataa

SEQ ID NO: 41385 - DNA, 21 bp, Artificial Sequence
  Synthetic: FXN 3 forward 9:69044207-69044231; SpCas9
caagaataaggactgtaataa

SEQ ID NO: 41386 - DNA, 20 bp, Artificial Sequence
  Synthetic: FXN 3 forward 9:69044208-69044231; SpCas9
aagaataaggactgtaataa

SEQ ID NO: 41387 - DNA, 19 bp, Artificial Sequence
  Synthetic: FXN 3 forward 9:69044209-69044231; SpCas9
agaataaggactgtaataa

SEQ ID NO: 41388 - DNA, 18 bp, Artificial Sequence
  Synthetic: FXN 3 forward 9:69044210-69044231; SpCas9
gaataaggactgtaataa

SEQ ID NO: 41389 - DNA, 25 bp, Artificial Sequence
  Synthetic: FXN 3 reverse 9:69044203-69044231; SpCas9
ctcttattacagtccttattcttgg

SEQ ID NO: 41390 - DNA, 24 bp, Artificial Sequence
  Synthetic: FXN 3 reverse 9:69044204-69044231; SpCas9
tcttattacagtccttattcttgg

SEQ ID NO: 41391 - DNA, 23 bp, Artificial Sequence
  Synthetic: FXN 3 reverse 9:69044205-69044231; SpCas9
cttattacagtccttattcttgg

SEQ ID NO: 41392 - DNA, 22 bp, Artificial Sequence
  Synthetic: FXN 3 reverse 9:69044206-69044231; SpCas9
ttattacagtccttattcttgg

SEQ ID NO: 41393 - DNA, 21 bp, Artificial Sequence
  Synthetic: FXN 3 reverse 9:69044207-69044231; SpCas9
tattacagtccttattcttgg

SEQ ID NO: 41394 - DNA, 20 bp, Artificial Sequence
  Synthetic: FXN 3 reverse 9:69044208-69044231; SpCas9
attacagtccttattcttgg

SEQ ID NO: 41395 - DNA, 19 bp, Artificial Sequence
  Synthetic: FXN 3 reverse 9:69044209-69044231; SpCas9
ttacagtccttattcttgg

SEQ ID NO: 41396 - DNA, 18 bp, Artificial Sequence
  Synthetic: FXN 3 reverse 9:69044210-69044231; SpCas9
tacagtccttattcttgg

SEQ ID NO: 41397 - DNA, 25 bp, Artificial Sequence
  Synthetic: FXN 3 reverse 9:69044206-69044234; SpCas9
gtactcttattacagtccttattct

SEQ ID NO: 41398 - DNA, 24 bp, Artificial Sequence
  Synthetic: FXN 3 reverse 9:69044207-69044234; SpCas9
tactcttattacagtccttattct

SEQ ID NO: 41399 - DNA, 23 bp, Artificial Sequence
  Synthetic: FXN 3 reverse 9:69044208-69044234; SpCas9
actcttattacagtccttattct

SEQ ID NO: 41400 - DNA, 22 bp, Artificial Sequence
  Synthetic: FXN 3 reverse 9:69044209-69044234; SpCas9
ctcttattacagtccttattct

SEQ ID NO: 41401 - DNA, 21 bp, Artificial Sequence
  Synthetic: FXN 3 reverse 9:69044210-69044234; SpCas9
tcttattacagtccttattct

SEQ ID NO: 41402 - DNA, 20 bp, Artificial Sequence
  Synthetic: FXN 3 reverse 9:69044211-69044234; SpCas9
cttattacagtccttattct

SEQ ID NO: 41403 - DNA, 19 bp, Artificial Sequence
  Synthetic: FXN 3 reverse 9:69044212-69044234; SpCas9
ttattacagtccttattct

SEQ ID NO: 41404 - DNA, 18 bp, Artificial Sequence
  Synthetic: FXN 3 reverse 9:69044213-69044234; SpCas9
tattacagtccttattct

SEQ ID NO: 41405 - DNA, 25 bp, Artificial Sequence
  Synthetic: FXN 3 forward 9:69044217-69044245; SpCas9
gactgtaataagagtacgtccctca

SEQ ID NO: 41406 - DNA, 24 bp, Artificial Sequence
  Synthetic: FXN 3 forward 9:69044218-69044245; SpCas9
actgtaataagagtacgtccctca

SEQ ID NO: 41407 - DNA, 23 bp, Artificial Sequence
  Synthetic: FXN 3 forward 9:69044219-69044245; SpCas9
ctgtaataagagtacgtccctca

SEQ ID NO: 41408 - DNA, 22 bp, Artificial Sequence
  Synthetic: FXN 3 forward 9:69044220-69044245; SpCas9
tgtaataagagtacgtccctca

SEQ ID NO: 41409 - DNA, 21 bp, Artificial Sequence
  Synthetic: FXN 3 forward 9:69044221-69044245; SpCas9
gtaataagagtacgtccctca

SEQ ID NO: 41410 - DNA, 20 bp, Artificial Sequence
  Synthetic: FXN 3 forward 9:69044222-69044245; SpCas9
taataagagtacgtccctca

SEQ ID NO: 41411 - DNA, 19 bp, Artificial Sequence
  Synthetic: FXN 3 forward 9:69044223-69044245; SpCas9
aataagagtacgtccctca

SEQ ID NO: 41412 - DNA, 18 bp, Artificial Sequence
  Synthetic: FXN 3 forward 9:69044224-69044245; SpCas9
ataagagtacgtccctca

SEQ ID NO: 41413 - DNA, 25 bp, Artificial Sequence
  Synthetic: FXN 3 forward 9:69044218-69044246; SpCas9
actgtaataagagtacgtccctcac

SEQ ID NO: 41414 - DNA, 24 bp, Artificial Sequence
  Synthetic: FXN 3 forward 9:69044219-69044246; SpCas9
ctgtaataagagtacgtccctcac

SEQ ID NO: 41415 - DNA, 23 bp, Artificial Sequence
  Synthetic: FXN 3 forward 9:69044220-69044246; SpCas9
tgtaataagagtacgtccctcac

SEQ ID NO: 41416 - DNA, 22 bp, Artificial Sequence
  Synthetic: FXN 3 forward 9:69044221-69044246; SpCas9
gtaataagagtacgtccctcac

SEQ ID NO: 41417 - DNA, 21 bp, Artificial Sequence
  Synthetic: FXN 3 forward 9:69044222-69044246; SpCas9
taataagagtacgtccctcac

SEQ ID NO: 41418 - DNA, 20 bp, Artificial Sequence
  Synthetic: FXN 3 forward 9:69044223-69044246; SpCas9
aataagagtacgtccctcac

SEQ ID NO: 41419 - DNA, 19 bp, Artificial Sequence
  Synthetic: FXN 3 forward 9:69044224-69044246; SpCas9
ataagagtacgtccctcac

SEQ ID NO: 41420 - DNA, 18 bp, Artificial Sequence
  Synthetic: FXN 3 forward 9:69044225-69044246; SpCas9
taagagtacgtccctcac

SEQ ID NO: 41421 - DNA, 25 bp, Artificial Sequence
  Synthetic: FXN 3 reverse 9:69044219-69044247; SpCas9
tcctgtgagggacgtactcttatta

SEQ ID NO: 41422 - DNA, 24 bp, Artificial Sequence
  Synthetic: FXN 3 reverse 9:69044220-69044247; SpCas9
cctgtgagggacgtactcttatta

SEQ ID NO: 41423 - DNA, 23 bp, Artificial Sequence
  Synthetic: FXN 3 reverse 9:69044221-69044247; SpCas9
ctgtgagggacgtactcttatta

SEQ ID NO: 41424 - DNA, 22 bp, Artificial Sequence
  Synthetic: FXN 3 reverse 9:69044222-69044247; SpCas9
tgtgagggacgtactcttatta

SEQ ID NO: 41425 - DNA, 21 bp, Artificial Sequence
  Synthetic: FXN 3 reverse 9:69044223-69044247; SpCas9
gtgagggacgtactcttatta

SEQ ID NO: 41426 - DNA, 20 bp, Artificial Sequence
  Synthetic: FXN 3 reverse 9:69044224-69044247; SpCas9
tgagggacgtactcttatta

SEQ ID NO: 41427 - DNA, 19 bp, Artificial Sequence
  Synthetic: FXN 3 reverse 9:69044225-69044247; SpCas9
gagggacgtactcttatta

SEQ ID NO: 41428 - DNA, 18 bp, Artificial Sequence
  Synthetic: FXN 3 reverse 9:69044226-69044247; SpCas9
agggacgtactcttatta

SEQ ID NO: 41429 - DNA, 25 bp, Artificial Sequence
  Synthetic: FXN 3 forward 9:69044230-69044258; SpCas9
gtacgtccctcacaggattgtaatg

SEQ ID NO: 41430 - DNA, 24 bp, Artificial Sequence
  Synthetic: FXN 3 forward 9:69044231-69044258; SpCas9
tacgtccctcacaggattgtaatg

SEQ ID NO: 41431 - DNA, 23 bp, Artificial Sequence
  Synthetic: FXN 3 forward 9:69044232-69044258; SpCas9
acgtccctcacaggattgtaatg

SEQ ID NO: 41432 - DNA, 22 bp, Artificial Sequence
  Synthetic: FXN 3 forward 9:69044233-69044258; SpCas9
cgtccctcacaggattgtaatg

SEQ ID NO: 41433 - DNA, 21 bp, Artificial Sequence
  Synthetic: FXN 3 forward 9:69044234-69044258; SpCas9
gtccctcacaggattgtaatg

SEQ ID NO: 41434 - DNA, 20 bp, Artificial Sequence
  Synthetic: FXN 3 forward 9:69044235-69044258; SpCas9
tccctcacaggattgtaatg

SEQ ID NO: 41435 - DNA, 19 bp, Artificial Sequence
  Synthetic: FXN 3 forward 9:69044236-69044258; SpCas9
ccctcacaggattgtaatg

SEQ ID NO: 41436 - DNA, 18 bp, Artificial Sequence
  Synthetic: FXN 3 forward 9:69044237-69044258; SpCas9
cctcacaggattgtaatg

SEQ ID NO: 41437 - DNA, 25 bp, Artificial Sequence
  Synthetic: FXN 3 forward 9:69044236-69044264; SpCas9
ccctcacaggattgtaatgaagact

SEQ ID NO: 41438 - DNA, 24 bp, Artificial Sequence
  Synthetic: FXN 3 forward 9:69044237-69044264; SpCas9
cctcacaggattgtaatgaagact

SEQ ID NO: 41439 - DNA, 23 bp, Artificial Sequence
  Synthetic: FXN 3 forward 9:69044238-69044264; SpCas9
ctcacaggattgtaatgaagact

SEQ ID NO: 41440 - DNA, 22 bp, Artificial Sequence
  Synthetic: FXN 3 forward 9:69044239-69044264; SpCas9
tcacaggattgtaatgaagact

SEQ ID NO: 41441 - DNA, 21 bp, Artificial Sequence
  Synthetic: FXN 3 forward 9:69044240-69044264; SpCas9
cacaggattgtaatgaagact

SEQ ID NO: 41442 - DNA, 20 bp, Artificial Sequence
  Synthetic: FXN 3 forward 9:69044241-69044264; SpCas9
acaggattgtaatgaagact

SEQ ID NO: 41443 - DNA, 19 bp, Artificial Sequence
  Synthetic: FXN 3 forward 9:69044242-69044264; SpCas9
caggattgtaatgaagact

SEQ ID NO: 41444 - DNA, 18 bp, Artificial Sequence
  Synthetic: FXN 3 forward 9:69044243-69044264; SpCas9
aggattgtaatgaagact

SEQ ID NO: 41445 - DNA, 25 bp, Artificial Sequence
  Synthetic: FXN 3 reverse 9:69044236-69044264; SpCas9
ctcagtcttcattacaatcctgtga

SEQ ID NO: 41446 - DNA, 24 bp, Artificial Sequence
  Synthetic: FXN 3 reverse 9:69044237-69044264; SpCas9
tcagtcttcattacaatcctgtga

SEQ ID NO: 41447 - DNA, 23 bp, Artificial Sequence
  Synthetic: FXN 3 reverse 9:69044238-69044264; SpCas9
cagtcttcattacaatcctgtga

SEQ ID NO: 41448 - DNA, 22 bp, Artificial Sequence
  Synthetic: FXN 3 reverse 9:69044239-69044264; SpCas9
agtcttcattacaatcctgtga

SEQ ID NO: 41449 - DNA, 21 bp, Artificial Sequence
  Synthetic: FXN 3 reverse 9:69044240-69044264; SpCas9
gtcttcattacaatcctgtga

SEQ ID NO: 41450 - DNA, 20 bp, Artificial Sequence
  Synthetic: FXN 3 reverse 9:69044241-69044264; SpCas9
tcttcattacaatcctgtga

SEQ ID NO: 41451 - DNA, 19 bp, Artificial Sequence
  Synthetic: FXN 3 reverse 9:69044242-69044264; SpCas9
cttcattacaatcctgtga

SEQ ID NO: 41452 - DNA, 18 bp, Artificial Sequence
  Synthetic: FXN 3 reverse 9:69044243-69044264; SpCas9
ttcattacaatcctgtga

SEQ ID NO: 41453 - DNA, 25 bp, Artificial Sequence
  Synthetic: FXN 3 reverse 9:69044237-69044265; SpCas9
actcagtcttcattacaatcctgtg

SEQ ID NO: 41454 - DNA, 24 bp, Artificial Sequence
  Synthetic: FXN 3 reverse 9:69044238-69044265; SpCas9
ctcagtcttcattacaatcctgtg

SEQ ID NO: 41455 - DNA, 23 bp, Artificial Sequence
  Synthetic: FXN 3 reverse 9:69044239-69044265; SpCas9
tcagtcttcattacaatcctgtg

SEQ ID NO: 41456 - DNA, 22 bp, Artificial Sequence
  Synthetic: FXN 3 reverse 9:69044240-69044265; SpCas9
cagtcttcattacaatcctgtg

SEQ ID NO: 41457 - DNA, 21 bp, Artificial Sequence
  Synthetic: FXN 3 reverse 9:69044241-69044265; SpCas9
agtcttcattacaatcctgtg

SEQ ID NO: 41458 - DNA, 20 bp, Artificial Sequence
  Synthetic: FXN 3 reverse 9:69044242-69044265; SpCas9
gtcttcattacaatcctgtg

SEQ ID NO: 41459 - DNA, 19 bp, Artificial Sequence
  Synthetic: FXN 3 reverse 9:69044243-69044265; SpCas9
tcttcattacaatcctgtg

SEQ ID NO: 41460 - DNA, 18 bp, Artificial Sequence
  Synthetic: FXN 3 reverse 9:69044244-69044265; SpCas9
cttcattacaatcctgtg

SEQ ID NO: 41461 - DNA, 25 bp, Artificial Sequence
  Synthetic: FXN 3 reverse 9:69044238-69044266; SpCas9
gactcagtcttcattacaatcctgt

SEQ ID NO: 41462 - DNA, 24 bp, Artificial Sequence
  Synthetic: FXN 3 reverse 9:69044239-69044266; SpCas9
actcagtcttcattacaatcctgt

SEQ ID NO: 41463 - DNA, 23 bp, Artificial Sequence
  Synthetic: FXN 3 reverse 9:69044240-69044266; SpCas9
ctcagtcttcattacaatcctgt

SEQ ID NO: 41464 - DNA, 22 bp, Artificial Sequence
  Synthetic: FXN 3 reverse 9:69044241-69044266; SpCas9
tcagtcttcattacaatcctgt

SEQ ID NO: 41465 - DNA, 21 bp, Artificial Sequence
  Synthetic: FXN 3 reverse 9:69044242-69044266; SpCas9
cagtcttcattacaatcctgt

SEQ ID NO: 41466 - DNA, 20 bp, Artificial Sequence
  Synthetic: FXN 3 reverse 9:69044243-69044266; SpCas9
agtcttcattacaatcctgt

SEQ ID NO: 41467 - DNA, 19 bp, Artificial Sequence
  Synthetic: FXN 3 reverse 9:69044244-69044266; SpCas9
gtcttcattacaatcctgt

SEQ ID NO: 41468 - DNA, 18 bp, Artificial Sequence
  Synthetic: FXN 3 reverse 9:69044245-69044266; SpCas9
tcttcattacaatcctgt

SEQ ID NO: 41469 - DNA, 25 bp, Artificial Sequence
  Synthetic: FXN 3 forward 9:69044251-69044279; SpCas9
aatgaagactgagtccatttacata

SEQ ID NO: 41470 - DNA, 24 bp, Artificial Sequence
  Synthetic: FXN 3 forward 9:69044252-69044279; SpCas9
atgaagactgagtccatttacata

SEQ ID NO: 41471 - DNA, 23 bp, Artificial Sequence
  Synthetic: FXN 3 forward 9:69044253-69044279; SpCas9
tgaagactgagtccatttacata

SEQ ID NO: 41472 - DNA, 22 bp, Artificial Sequence
  Synthetic: FXN 3 forward 9:69044254-69044279; SpCas9
gaagactgagtccatttacata

SEQ ID NO: 41473 - DNA, 21 bp, Artificial Sequence
  Synthetic: FXN 3 forward 9:69044255-69044279; SpCas9
aagactgagtccatttacata

SEQ ID NO: 41474 - DNA, 20 bp, Artificial Sequence
  Synthetic: FXN 3 forward 9:69044256-69044279; SpCas9
agactgagtccatttacata

SEQ ID NO: 41475 - DNA, 19 bp, Artificial Sequence
  Synthetic: FXN 3 forward 9:69044257-69044279; SpCas9
gactgagtccatttacata

SEQ ID NO: 41476 - DNA, 18 bp, Artificial Sequence
  Synthetic: FXN 3 forward 9:69044258-69044279; SpCas9
actgagtccatttacata

SEQ ID NO: 41477 - DNA, 25 bp, Artificial Sequence
  Synthetic: FXN 3 forward 9:69044252-69044280; SpCas9
atgaagactgagtccatttacataa

SEQ ID NO: 41478 - DNA, 24 bp, Artificial Sequence
  Synthetic: FXN 3 forward 9:69044253-69044280; SpCas9
tgaagactgagtccatttacataa

SEQ ID NO: 41479 - DNA, 23 bp, Artificial Sequence
  Synthetic: FXN 3 forward 9:69044254-69044280; SpCas9
gaagactgagtccatttacataa

SEQ ID NO: 41480 - DNA, 22 bp, Artificial Sequence
  Synthetic: FXN 3 forward 9:69044255-69044280; SpCas9
aagactgagtccatttacataa

SEQ ID NO: 41481 - DNA, 21 bp, Artificial Sequence
  Synthetic: FXN 3 forward 9:69044256-69044280; SpCas9
agactgagtccatttacataa

SEQ ID NO: 41482 - DNA, 20 bp, Artificial Sequence
  Synthetic: FXN 3 forward 9:69044257-69044280; SpCas9
gactgagtccatttacataa

SEQ ID NO: 41483 - DNA, 19 bp, Artificial Sequence
  Synthetic: FXN 3 forward 9:69044258-69044280; SpCas9
actgagtccatttacataa

SEQ ID NO: 41484 - DNA, 18 bp, Artificial Sequence
  Synthetic: FXN 3 forward 9:69044259-69044280; SpCas9
ctgagtccatttacataa

SEQ ID NO: 41485 - DNA, 25 bp, Artificial Sequence
  Synthetic: FXN 3 forward 9:69044257-69044285; SpCas9
gactgagtccatttacataaaggct

SEQ ID NO: 41486 - DNA, 24 bp, Artificial Sequence
  Synthetic: FXN 3 forward 9:69044258-69044285; SpCas9
actgagtccatttacataaaggct

SEQ ID NO: 41487 - DNA, 23 bp, Artificial Sequence
  Synthetic: FXN 3 forward 9:69044259-69044285; SpCas9
ctgagtccatttacataaaggct

SEQ ID NO: 41488 - DNA, 22 bp, Artificial Sequence
  Synthetic: FXN 3 forward 9:69044260-69044285; SpCas9
tgagtccatttacataaaggct

SEQ ID NO: 41489 - DNA, 21 bp, Artificial Sequence
  Synthetic: FXN 3 forward 9:69044261-69044285; SpCas9
gagtccatttacataaaggct

SEQ ID NO: 41490 - DNA, 20 bp, Artificial Sequence
  Synthetic: FXN 3 forward 9:69044262-69044285; SpCas9
agtccatttacataaaggct

SEQ ID NO: 41491 - DNA, 19 bp, Artificial Sequence
  Synthetic: FXN 3 forward 9:69044263-69044285; SpCas9
gtccatttacataaaggct

SEQ ID NO: 41492 - DNA, 18 bp, Artificial Sequence
  Synthetic: FXN 3 forward 9:69044264-69044285; SpCas9
tccatttacataaaggct

SEQ ID NO: 41493 - DNA, 25 bp, Artificial Sequence
  Synthetic: FXN 3 forward 9:69044259-69044287; SpCas9
ctgagtccatttacataaaggctga

SEQ ID NO: 41494 - DNA, 24 bp, Artificial Sequence
  Synthetic: FXN 3 forward 9:69044260-69044287; SpCas9
tgagtccatttacataaaggctga

SEQ ID NO: 41495 - DNA, 23 bp, Artificial Sequence
  Synthetic: FXN 3 forward 9:69044261-69044287; SpCas9
gagtccatttacataaaggctga

SEQ ID NO: 41496 - DNA, 22 bp, Artificial Sequence
  Synthetic: FXN 3 forward 9:69044262-69044287; SpCas9
agtccatttacataaaggctga

SEQ ID NO: 41497 - DNA, 21 bp, Artificial Sequence
  Synthetic: FXN 3 forward 9:69044263-69044287; SpCas9
gtccatttacataaaggctga

SEQ ID NO: 41498 - DNA, 20 bp, Artificial Sequence
  Synthetic: FXN 3 forward 9:69044264-69044287; SpCas9
tccatttacataaaggctga

SEQ ID NO: 41499 - DNA, 19 bp, Artificial Sequence
  Synthetic: FXN 3 forward 9:69044265-69044287; SpCas9
ccatttacataaaggctga

SEQ ID NO: 41500 - DNA, 18 bp, Artificial Sequence
  Synthetic: FXN 3 forward 9:69044266-69044287; SpCas9
catttacataaaggctga

SEQ ID NO: 41501 - DNA, 25 bp, Artificial Sequence
  Synthetic: FXN 3 reverse 9:69044259-69044287; SpCas9
ctctcagcctttatgtaaatggact

SEQ ID NO: 41502 - DNA, 24 bp, Artificial Sequence
  Synthetic: FXN 3 reverse 9:69044260-69044287; SpCas9
tctcagcctttatgtaaatggact

SEQ ID NO: 41503 - DNA, 23 bp, Artificial Sequence
  Synthetic: FXN 3 reverse 9:69044261-69044287; SpCas9
ctcagcctttatgtaaatggact

SEQ ID NO: 41504 - DNA, 22 bp, Artificial Sequence
  Synthetic: FXN 3 reverse 9:69044262-69044287; SpCas9
tcagcctttatgtaaatggact

SEQ ID NO: 41505 - DNA, 21 bp, Artificial Sequence
  Synthetic: FXN 3 reverse 9:69044263-69044287; SpCas9
cagcctttatgtaaatggact

SEQ ID NO: 41506 - DNA, 20 bp, Artificial Sequence
  Synthetic: FXN 3 reverse 9:69044264-69044287; SpCas9
agcctttatgtaaatggact

SEQ ID NO: 41507 - DNA, 19 bp, Artificial Sequence
  Synthetic: FXN 3 reverse 9:69044265-69044287; SpCas9
gcctttatgtaaatggact

SEQ ID NO: 41508 - DNA, 18 bp, Artificial Sequence
  Synthetic: FXN 3 reverse 9:69044266-69044287; SpCas9
cctttatgtaaatggact

SEQ ID NO: 41509 - DNA, 25 bp, Artificial Sequence
  Synthetic: FXN 3 forward 9:69044262-69044290; SpCas9
agtccatttacataaaggctgagag

SEQ ID NO: 41510 - DNA, 24 bp, Artificial Sequence
  Synthetic: FXN 3 forward 9:69044263-69044290; SpCas9
gtccatttacataaaggctgagag

SEQ ID NO: 41511 - DNA, 23 bp, Artificial Sequence
  Synthetic: FXN 3 forward 9:69044264-69044290; SpCas9
tccatttacataaaggctgagag

SEQ ID NO: 41512 - DNA, 22 bp, Artificial Sequence
  Synthetic: FXN 3 forward 9:69044265-69044290; SpCas9
ccatttacataaaggctgagag

SEQ ID NO: 41513 - DNA, 21 bp, Artificial Sequence
  Synthetic: FXN 3 forward 9:69044266-69044290; SpCas9
catttacataaaggctgagag

SEQ ID NO: 41514 - DNA, 20 bp, Artificial Sequence
  Synthetic: FXN 3 forward 9:69044267-69044290; SpCas9
atttacataaaggctgagag

SEQ ID NO: 41515 - DNA, 19 bp, Artificial Sequence
  Synthetic: FXN 3 forward 9:69044268-69044290; SpCas9
tttacataaaggctgagag

SEQ ID NO: 41516 - DNA, 18 bp, Artificial Sequence
  Synthetic: FXN 3 forward 9:69044269-69044290; SpCas9
ttacataaaggctgagag

SEQ ID NO: 41517 - DNA, 25 bp, Artificial Sequence
  Synthetic: FXN 3 reverse 9:69044265-69044293; SpCas9
acactgctctcagcctttatgtaaa

SEQ ID NO: 41518 - DNA, 24 bp, Artificial Sequence
  Synthetic: FXN 3 reverse 9:69044266-69044293; SpCas9
cactgctctcagcctttatgtaaa

SEQ ID NO: 41519 - DNA, 23 bp, Artificial Sequence
  Synthetic: FXN 3 reverse 9:69044267-69044293; SpCas9
actgctctcagcctttatgtaaa

SEQ ID NO: 41520 - DNA, 22 bp, Artificial Sequence
  Synthetic: FXN 3 reverse 9:69044268-69044293; SpCas9
ctgctctcagcctttatgtaaa

SEQ ID NO: 41521 - DNA, 21 bp, Artificial Sequence
  Synthetic: FXN 3 reverse 9:69044269-69044293; SpCas9
tgctctcagcctttatgtaaa

SEQ ID NO: 41522 - DNA, 20 bp, Artificial Sequence
  Synthetic: FXN 3 reverse 9:69044270-69044293; SpCas9
gctctcagcctttatgtaaa

SEQ ID NO: 41523 - DNA, 19 bp, Artificial Sequence
  Synthetic: FXN 3 reverse 9:69044271-69044293; SpCas9
ctctcagcctttatgtaaa

SEQ ID NO: 41524 - DNA, 18 bp, Artificial Sequence
  Synthetic: FXN 3 reverse 9:69044272-69044293; SpCas9
tctcagcctttatgtaaa

SEQ ID NO: 41525 - DNA, 25 bp, Artificial Sequence
  Synthetic: FXN 3 forward 9:69044269-69044297; SpCas9
ttacataaaggctgagagcagtgtc

SEQ ID NO: 41526 - DNA, 24 bp, Artificial Sequence
  Synthetic: FXN 3 forward 9:69044270-69044297; SpCas9
tacataaaggctgagagcagtgtc

SEQ ID NO: 41527 - DNA, 23 bp, Artificial Sequence
  Synthetic: FXN 3 forward 9:69044271-69044297; SpCas9
acataaaggctgagagcagtgtc

SEQ ID NO: 41528 - DNA, 22 bp, Artificial Sequence
  Synthetic: FXN 3 forward 9:69044272-69044297; SpCas9
cataaaggctgagagcagtgtc

SEQ ID NO: 41529 - DNA, 21 bp, Artificial Sequence
  Synthetic: FXN 3 forward 9:69044273-69044297; SpCas9
ataaaggctgagagcagtgtc

SEQ ID NO: 41530 - DNA, 20 bp, Artificial Sequence
  Synthetic: FXN 3 forward 9:69044274-69044297; SpCas9
taaaggctgagagcagtgtc

SEQ ID NO: 41531 - DNA, 19 bp, Artificial Sequence
  Synthetic: FXN 3 forward 9:69044275-69044297; SpCas9
aaaggctgagagcagtgtc

SEQ ID NO: 41532 - DNA, 18 bp, Artificial Sequence
  Synthetic: FXN 3 forward 9:69044276-69044297; SpCas9
aaggctgagagcagtgtc

SEQ ID NO: 41533 - DNA, 25 bp, Artificial Sequence
  Synthetic: FXN 3 forward 9:69044272-69044300; SpCas9
cataaaggctgagagcagtgtcaag

SEQ ID NO: 41534 - DNA, 24 bp, Artificial Sequence
  Synthetic: FXN 3 forward 9:69044273-69044300; SpCas9
ataaaggctgagagcagtgtcaag

SEQ ID NO: 41535 - DNA, 23 bp, Artificial Sequence
  Synthetic: FXN 3 forward 9:69044274-69044300; SpCas9
taaaggctgagagcagtgtcaag

SEQ ID NO: 41536 - DNA, 22 bp, Artificial Sequence
  Synthetic: FXN 3 forward 9:69044275-69044300; SpCas9
aaaggctgagagcagtgtcaag

SEQ ID NO: 41537 - DNA, 21 bp, Artificial Sequence
  Synthetic: FXN 3 forward 9:69044276-69044300; SpCas9
aaggctgagagcagtgtcaag

SEQ ID NO: 41538 - DNA, 20 bp, Artificial Sequence
  Synthetic: FXN 3 forward 9:69044277-69044300; SpCas9
aggctgagagcagtgtcaag

SEQ ID NO: 41539 - DNA, 19 bp, Artificial Sequence
  Synthetic: FXN 3 forward 9:69044278-69044300; SpCas9
ggctgagagcagtgtcaag

SEQ ID NO: 41540 - DNA, 18 bp, Artificial Sequence
  Synthetic: FXN 3 forward 9:69044279-69044300; SpCas9
gctgagagcagtgtcaag

SEQ ID NO: 41541 - DNA, 25 bp, Artificial Sequence
  Synthetic: FXN 3 forward 9:69044276-69044304; SpCas9
aaggctgagagcagtgtcaagcaga

SEQ ID NO: 41542 - DNA, 24 bp, Artificial Sequence
  Synthetic: FXN 3 forward 9:69044277-69044304; SpCas9
aggctgagagcagtgtcaagcaga

SEQ ID NO: 41543 - DNA, 23 bp, Artificial Sequence
  Synthetic: FXN 3 forward 9:69044278-69044304; SpCas9
ggctgagagcagtgtcaagcaga

SEQ ID NO: 41544 - DNA, 22 bp, Artificial Sequence
  Synthetic: FXN 3 forward 9:69044279-69044304; SpCas9
gctgagagcagtgtcaagcaga

SEQ ID NO: 41545 - DNA, 21 bp, Artificial Sequence
  Synthetic: FXN 3 forward 9:69044280-69044304; SpCas9
ctgagagcagtgtcaagcaga

SEQ ID NO: 41546 - DNA, 20 bp, Artificial Sequence
  Synthetic: FXN 3 forward 9:69044281-69044304; SpCas9
tgagagcagtgtcaagcaga

SEQ ID NO: 41547 - DNA, 19 bp, Artificial Sequence
  Synthetic: FXN 3 forward 9:69044282-69044304; SpCas9
gagagcagtgtcaagcaga

SEQ ID NO: 41548 - DNA, 18 bp, Artificial Sequence
  Synthetic: FXN 3 forward 9:69044283-69044304; SpCas9
agagcagtgtcaagcaga

SEQ ID NO: 41549 - DNA, 25 bp, Artificial Sequence
  Synthetic: FXN 3 forward 9:69044278-69044306; SpCas9
ggctgagagcagtgtcaagcagatg

SEQ ID NO: 41550 - DNA, 24 bp, Artificial Sequence
  Synthetic: FXN 3 forward 9:69044279-69044306; SpCas9
gctgagagcagtgtcaagcagatg

SEQ ID NO: 41551 - DNA, 23 bp, Artificial Sequence
  Synthetic: FXN 3 forward 9:69044280-69044306; SpCas9
ctgagagcagtgtcaagcagatg

SEQ ID NO: 41552 - DNA, 22 bp, Artificial Sequence
  Synthetic: FXN 3 forward 9:69044281-69044306; SpCas9
tgagagcagtgtcaagcagatg

SEQ ID NO: 41553 - DNA, 21 bp, Artificial Sequence
  Synthetic: FXN 3 forward 9:69044282-69044306; SpCas9
gagagcagtgtcaagcagatg

SEQ ID NO: 41554 - DNA, 20 bp, Artificial Sequence
  Synthetic: FXN 3 forward 9:69044283-69044306; SpCas9
agagcagtgtcaagcagatg

SEQ ID NO: 41555 - DNA, 19 bp, Artificial Sequence
  Synthetic: FXN 3 forward 9:69044284-69044306; SpCas9
gagcagtgtcaagcagatg

SEQ ID NO: 41556 - DNA, 18 bp, Artificial Sequence
  Synthetic: FXN 3 forward 9:69044285-69044306; SpCas9
agcagtgtcaagcagatg

SEQ ID NO: 41557 - DNA, 25 bp, Artificial Sequence
  Synthetic: FXN 3 reverse 9:69044280-69044308; SpCas9
ttctccatctgcttgacactgctct

SEQ ID NO: 41558 - DNA, 24 bp, Artificial Sequence
  Synthetic: FXN 3 reverse 9:69044281-69044308; SpCas9
tctccatctgcttgacactgctct

SEQ ID NO: 41559 - DNA, 23 bp, Artificial Sequence
  Synthetic: FXN 3 reverse 9:69044282-69044308; SpCas9
ctccatctgcttgacactgctct

SEQ ID NO: 41560 - DNA, 22 bp, Artificial Sequence
  Synthetic: FXN 3 reverse 9:69044283-69044308; SpCas9
tccatctgcttgacactgctct

SEQ ID NO: 41561 - DNA, 21 bp, Artificial Sequence
  Synthetic: FXN 3 reverse 9:69044284-69044308; SpCas9
ccatctgcttgacactgctct

SEQ ID NO: 41562 - DNA, 20 bp, Artificial Sequence
  Synthetic: FXN 3 reverse 9:69044285-69044308; SpCas9
catctgcttgacactgctct

SEQ ID NO: 41563 - DNA, 19 bp, Artificial Sequence
  Synthetic: FXN 3 reverse 9:69044286-69044308; SpCas9
atctgcttgacactgctct

SEQ ID NO: 41564 - DNA, 18 bp, Artificial Sequence
  Synthetic: FXN 3 reverse 9:69044287-69044308; SpCas9
tctgcttgacactgctct

SEQ ID NO: 41565 - DNA, 25 bp, Artificial Sequence
  Synthetic: FXN 3 forward 9:69044288-69044316; SpCas9
agtgtcaagcagatggagaacactg

SEQ ID NO: 41566 - DNA, 24 bp, Artificial Sequence
  Synthetic: FXN 3 forward 9:69044289-69044316; SpCas9
gtgtcaagcagatggagaacactg

SEQ ID NO: 41567 - DNA, 23 bp, Artificial Sequence
  Synthetic: FXN 3 forward 9:69044290-69044316; SpCas9
tgtcaagcagatggagaacactg

SEQ ID NO: 41568 - DNA, 22 bp, Artificial Sequence
  Synthetic: FXN 3 forward 9:69044291-69044316; SpCas9
gtcaagcagatggagaacactg

SEQ ID NO: 41569 - DNA, 21 bp, Artificial Sequence
  Synthetic: FXN 3 forward 9:69044292-69044316; SpCas9
tcaagcagatggagaacactg

SEQ ID NO: 41570 - DNA, 20 bp, Artificial Sequence
  Synthetic: FXN 3 forward 9:69044293-69044316; SpCas9
caagcagatggagaacactg

SEQ ID NO: 41571 - DNA, 19 bp, Artificial Sequence
  Synthetic: FXN 3 forward 9:69044294-69044316; SpCas9
aagcagatggagaacactg

SEQ ID NO: 41572 - DNA, 18 bp, Artificial Sequence
  Synthetic: FXN 3 forward 9:69044295-69044316; SpCas9
agcagatggagaacactg

SEQ ID NO: 41573 - DNA, 25 bp, Artificial Sequence
  Synthetic: FXN 3 forward 9:69044300-69044328; SpCas9
atggagaacactgtagaatgtgcga

SEQ ID NO: 41574 - DNA, 24 bp, Artificial Sequence
  Synthetic: FXN 3 forward 9:69044301-69044328; SpCas9
tggagaacactgtagaatgtgcga

SEQ ID NO: 41575 - DNA, 23 bp, Artificial Sequence
  Synthetic: FXN 3 forward 9:69044302-69044328; SpCas9
ggagaacactgtagaatgtgcga

SEQ ID NO: 41576 - DNA, 22 bp, Artificial Sequence
  Synthetic: FXN 3 forward 9:69044303-69044328; SpCas9
gagaacactgtagaatgtgcga

SEQ ID NO: 41577 - DNA, 21 bp, Artificial Sequence
  Synthetic: FXN 3 forward 9:69044304-69044328; SpCas9
agaacactgtagaatgtgcga

SEQ ID NO: 41578 - DNA, 20 bp, Artificial Sequence
  Synthetic: FXN 3 forward 9:69044305-69044328; SpCas9
gaacactgtagaatgtgcga

SEQ ID NO: 41579 - DNA, 19 bp, Artificial Sequence
  Synthetic: FXN 3 forward 9:69044306-69044328; SpCas9
aacactgtagaatgtgcga

SEQ ID NO: 41580 - DNA, 18 bp, Artificial Sequence
  Synthetic: FXN 3 forward 9:69044307-69044328; SpCas9
acactgtagaatgtgcga

SEQ ID NO: 41581 - DNA, 25 bp, Artificial Sequence
  Synthetic: FXN 3 forward 9:69044309-69044337; SpCas9
actgtagaatgtgcgatagctctaa

SEQ ID NO: 41582 - DNA, 24 bp, Artificial Sequence
  Synthetic: FXN 3 forward 9:69044310-69044337; SpCas9
ctgtagaatgtgcgatagctctaa

SEQ ID NO: 41583 - DNA, 23 bp, Artificial Sequence
  Synthetic: FXN 3 forward 9:69044311-69044337; SpCas9
tgtagaatgtgcgatagctctaa

SEQ ID NO: 41584 - DNA, 22 bp, Artificial Sequence
  Synthetic: FXN 3 forward 9:69044312-69044337; SpCas9
gtagaatgtgcgatagctctaa

SEQ ID NO: 41585 - DNA, 21 bp, Artificial Sequence
  Synthetic: FXN 3 forward 9:69044313-69044337; SpCas9
tagaatgtgcgatagctctaa

SEQ ID NO: 41586 - DNA, 20 bp, Artificial Sequence
  Synthetic: FXN 3 forward 9:69044314-69044337; SpCas9
agaatgtgcgatagctctaa

SEQ ID NO: 41587 - DNA, 19 bp, Artificial Sequence
  Synthetic: FXN 3 forward 9:69044315-69044337; SpCas9
gaatgtgcgatagctctaa

SEQ ID NO: 41588 - DNA, 18 bp, Artificial Sequence
  Synthetic: FXN 3 forward 9:69044316-69044337; SpCas9
aatgtgcgatagctctaa

SEQ ID NO: 41589 - DNA, 25 bp, Artificial Sequence
  Synthetic: FXN 3 reverse 9:69044310-69044338; SpCas9
actgttagagctatcgcacattcta

SEQ ID NO: 41590 - DNA, 24 bp, Artificial Sequence
  Synthetic: FXN 3 reverse 9:69044311-69044338; SpCas9
ctgttagagctatcgcacattcta

SEQ ID NO: 41591 - DNA, 23 bp, Artificial Sequence
  Synthetic: FXN 3 reverse 9:69044312-69044338; SpCas9
tgttagagctatcgcacattcta

SEQ ID NO: 41592 - DNA, 22 bp, Artificial Sequence
  Synthetic: FXN 3 reverse 9:69044313-69044338; SpCas9
gttagagctatcgcacattcta

SEQ ID NO: 41593 - DNA, 21 bp, Artificial Sequence
  Synthetic: FXN 3 reverse 9:69044314-69044338; SpCas9
ttagagctatcgcacattcta

SEQ ID NO: 41594 - DNA, 20 bp, Artificial Sequence
  Synthetic: FXN 3 reverse 9:69044315-69044338; SpCas9
tagagctatcgcacattcta

SEQ ID NO: 41595 - DNA, 19 bp, Artificial Sequence
  Synthetic: FXN 3 reverse 9:69044316-69044338; SpCas9
agagctatcgcacattcta

SEQ ID NO: 41596 - DNA, 18 bp, Artificial Sequence
  Synthetic: FXN 3 reverse 9:69044317-69044338; SpCas9
gagctatcgcacattcta

SEQ ID NO: 41597 - DNA, 25 bp, Artificial Sequence
  Synthetic: FXN 3 forward 9:69044312-69044340; SpCas9
gtagaatgtgcgatagctctaacag

SEQ ID NO: 41598 - DNA, 24 bp, Artificial Sequence
  Synthetic: FXN 3 forward 9:69044313-69044340; SpCas9
tagaatgtgcgatagctctaacag

SEQ ID NO: 41599 - DNA, 23 bp, Artificial Sequence
  Synthetic: FXN 3 forward 9:69044314-69044340; SpCas9
agaatgtgcgatagctctaacag

SEQ ID NO: 41600 - DNA, 22 bp, Artificial Sequence
  Synthetic: FXN 3 forward 9:69044315-69044340; SpCas9
gaatgtgcgatagctctaacag

SEQ ID NO: 41601 - DNA, 21 bp, Artificial Sequence
  Synthetic: FXN 3 forward 9:69044316-69044340; SpCas9
aatgtgcgatagctctaacag

SEQ ID NO: 41602 - DNA, 20 bp, Artificial Sequence
  Synthetic: FXN 3 forward 9:69044317-69044340; SpCas9
atgtgcgatagctctaacag

SEQ ID NO: 41603 - DNA, 19 bp, Artificial Sequence
  Synthetic: FXN 3 forward 9:69044318-69044340; SpCas9
tgtgcgatagctctaacag

SEQ ID NO: 41604 - DNA, 18 bp, Artificial Sequence
  Synthetic: FXN 3 forward 9:69044319-69044340; SpCas9
gtgcgatagctctaacag

SEQ ID NO: 41605 - DNA, 25 bp, Artificial Sequence
  Synthetic: FXN 3 forward 9:69044321-69044349; SpCas9
gcgatagctctaacagtggttatca

SEQ ID NO: 41606 - DNA, 24 bp, Artificial Sequence
  Synthetic: FXN 3 forward 9:69044322-69044349; SpCas9
cgatagctctaacagtggttatca

SEQ ID NO: 41607 - DNA, 23 bp, Artificial Sequence
  Synthetic: FXN 3 forward 9:69044323-69044349; SpCas9
gatagctctaacagtggttatca

SEQ ID NO: 41608 - DNA, 22 bp, Artificial Sequence
  Synthetic: FXN 3 forward 9:69044324-69044349; SpCas9
atagctctaacagtggttatca

SEQ ID NO: 41609 - DNA, 21 bp, Artificial Sequence
  Synthetic: FXN 3 forward 9:69044325-69044349; SpCas9
tagctctaacagtggttatca

SEQ ID NO: 41610 - DNA, 20 bp, Artificial Sequence
  Synthetic: FXN 3 forward 9:69044326-69044349; SpCas9
agctctaacagtggttatca

SEQ ID NO: 41611 - DNA, 19 bp, Artificial Sequence
  Synthetic: FXN 3 forward 9:69044327-69044349; SpCas9
gctctaacagtggttatca

SEQ ID NO: 41612 - DNA, 18 bp, Artificial Sequence
  Synthetic: FXN 3 forward 9:69044328-69044349; SpCas9
ctctaacagtggttatca

SEQ ID NO: 41613 - DNA, 25 bp, Artificial Sequence
  Synthetic: FXN 3 reverse 9:69044328-69044356; SpCas9
agggcagccatgataaccactgtta

SEQ ID NO: 41614 - DNA, 24 bp, Artificial Sequence
  Synthetic: FXN 3 reverse 9:69044329-69044356; SpCas9
gggcagccatgataaccactgtta

SEQ ID NO: 41615 - DNA, 23 bp, Artificial Sequence
  Synthetic: FXN 3 reverse 9:69044330-69044356; SpCas9
ggcagccatgataaccactgtta

SEQ ID NO: 41616 - DNA, 22 bp, Artificial Sequence
  Synthetic: FXN 3 reverse 9:69044331-69044356; SpCas9
gcagccatgataaccactgtta

SEQ ID NO: 41617 - DNA, 21 bp, Artificial Sequence
  Synthetic: FXN 3 reverse 9:69044332-69044356; SpCas9
cagccatgataaccactgtta

SEQ ID NO: 41618 - DNA, 20 bp, Artificial Sequence
  Synthetic: FXN 3 reverse 9:69044333-69044356; SpCas9
agccatgataaccactgtta

SEQ ID NO: 41619 - DNA, 19 bp, Artificial Sequence
  Synthetic: FXN 3 reverse 9:69044334-69044356; SpCas9
gccatgataaccactgtta

SEQ ID NO: 41620 - DNA, 18 bp, Artificial Sequence
  Synthetic: FXN 3 reverse 9:69044335-69044356; SpCas9
ccatgataaccactgtta

SEQ ID NO: 41621 - DNA, 25 bp, Artificial Sequence
  Synthetic: FXN 3 reverse 9:69044330-69044358; SpCas9
agagggcagccatgataaccactgt

SEQ ID NO: 41622 - DNA, 24 bp, Artificial Sequence
  Synthetic: FXN 3 reverse 9:69044331-69044358; SpCas9
gagggcagccatgataaccactgt

SEQ ID NO: 41623 - DNA, 23 bp, Artificial Sequence
  Synthetic: FXN 3 reverse 9:69044332-69044358; SpCas9
agggcagccatgataaccactgt

SEQ ID NO: 41624 - DNA, 22 bp, Artificial Sequence
  Synthetic: FXN 3 reverse 9:69044333-69044358; SpCas9
gggcagccatgataaccactgt

SEQ ID NO: 41625 - DNA, 21 bp, Artificial Sequence
  Synthetic: FXN 3 reverse 9:69044334-69044358; SpCas9
ggcagccatgataaccactgt

SEQ ID NO: 41626 - DNA, 20 bp, Artificial Sequence
  Synthetic: FXN 3 reverse 9:69044335-69044358; SpCas9
gcagccatgataaccactgt

SEQ ID NO: 41627 - DNA, 19 bp, Artificial Sequence
  Synthetic: FXN 3 reverse 9:69044336-69044358; SpCas9
cagccatgataaccactgt

SEQ ID NO: 41628 - DNA, 18 bp, Artificial Sequence
  Synthetic: FXN 3 reverse 9:69044337-69044358; SpCas9
agccatgataaccactgt

SEQ ID NO: 41629 - DNA, 25 bp, Artificial Sequence
  Synthetic: FXN 3 forward 9:69044341-69044369; SpCas9
tatcatggctgccctctcacttctt

SEQ ID NO: 41630 - DNA, 24 bp, Artificial Sequence
  Synthetic: FXN 3 forward 9:69044342-69044369; SpCas9
atcatggctgccctctcacttctt

SEQ ID NO: 41631 - DNA, 23 bp, Artificial Sequence
  Synthetic: FXN 3 forward 9:69044343-69044369; SpCas9
tcatggctgccctctcacttctt

SEQ ID NO: 41632 - DNA, 22 bp, Artificial Sequence
  Synthetic: FXN 3 forward 9:69044344-69044369; SpCas9
catggctgccctctcacttctt

SEQ ID NO: 41633 - DNA, 21 bp, Artificial Sequence
  Synthetic: FXN 3 forward 9:69044345-69044369; SpCas9
atggctgccctctcacttctt

SEQ ID NO: 41634 - DNA, 20 bp, Artificial Sequence
  Synthetic: FXN 3 forward 9:69044346-69044369; SpCas9
tggctgccctctcacttctt

SEQ ID NO: 41635 - DNA, 19 bp, Artificial Sequence
  Synthetic: FXN 3 forward 9:69044347-69044369; SpCas9
ggctgccctctcacttctt

SEQ ID NO: 41636 - DNA, 18 bp, Artificial Sequence
  Synthetic: FXN 3 forward 9:69044348-69044369; SpCas9
gctgccctctcacttctt

SEQ ID NO: 41637 - DNA, 25 bp, Artificial Sequence
  Synthetic: FXN 3 forward 9:69044343-69044371; SpCas9
tcatggctgccctctcacttcttca

SEQ ID NO: 41638 - DNA, 24 bp, Artificial Sequence
  Synthetic: FXN 3 forward 9:69044344-69044371; SpCas9
catggctgccctctcacttcttca

SEQ ID NO: 41639 - DNA, 23 bp, Artificial Sequence
  Synthetic: FXN 3 forward 9:69044345-69044371; SpCas9
atggctgccctctcacttcttca

SEQ ID NO: 41640 - DNA, 22 bp, Artificial Sequence
  Synthetic: FXN 3 forward 9:69044346-69044371; SpCas9
tggctgccctctcacttcttca

SEQ ID NO: 41641 - DNA, 21 bp, Artificial Sequence
  Synthetic: FXN 3 forward 9:69044347-69044371; SpCas9
ggctgccctctcacttcttca

SEQ ID NO: 41642 - DNA, 20 bp, Artificial Sequence
  Synthetic: FXN 3 forward 9:69044348-69044371; SpCas9
gctgccctctcacttcttca

SEQ ID NO: 41643 - DNA, 19 bp, Artificial Sequence
  Synthetic: FXN 3 forward 9:69044349-69044371; SpCas9
ctgccctctcacttcttca

SEQ ID NO: 41644 - DNA, 18 bp, Artificial Sequence
  Synthetic: FXN 3 forward 9:69044350-69044371; SpCas9
tgccctctcacttcttca

SEQ ID NO: 41645 - DNA, 25 bp, Artificial Sequence
  Synthetic: FXN 3 reverse 9:69044349-69044377; SpCas9
acatgtctctgaagaagtgagaggg

SEQ ID NO: 41646 - DNA, 24 bp, Artificial Sequence
  Synthetic: FXN 3 reverse 9:69044350-69044377; SpCas9
catgtctctgaagaagtgagaggg

SEQ ID NO: 41647 - DNA, 23 bp, Artificial Sequence
  Synthetic: FXN 3 reverse 9:69044351-69044377; SpCas9
atgtctctgaagaagtgagaggg

SEQ ID NO: 41648 - DNA, 22 bp, Artificial Sequence
  Synthetic: FXN 3 reverse 9:69044352-69044377; SpCas9
tgtctctgaagaagtgagaggg

SEQ ID NO: 41649 - DNA, 21 bp, Artificial Sequence
  Synthetic: FXN 3 reverse 9:69044353-69044377; SpCas9
gtctctgaagaagtgagaggg

SEQ ID NO: 41650 - DNA, 20 bp, Artificial Sequence
  Synthetic: FXN 3 reverse 9:69044354-69044377; SpCas9
tctctgaagaagtgagaggg

SEQ ID NO: 41651 - DNA, 19 bp, Artificial Sequence
  Synthetic: FXN 3 reverse 9:69044355-69044377; SpCas9
ctctgaagaagtgagaggg

SEQ ID NO: 41652 - DNA, 18 bp, Artificial Sequence
  Synthetic: FXN 3 reverse 9:69044356-69044377; SpCas9
tctgaagaagtgagaggg

SEQ ID NO: 41653 - DNA, 25 bp, Artificial Sequence
  Synthetic: FXN 3 reverse 9:69044352-69044380; SpCas9
aacacatgtctctgaagaagtgaga

SEQ ID NO: 41654 - DNA, 24 bp, Artificial Sequence
  Synthetic: FXN 3 reverse 9:69044353-69044380; SpCas9
acacatgtctctgaagaagtgaga

SEQ ID NO: 41655 - DNA, 23 bp, Artificial Sequence
  Synthetic: FXN 3 reverse 9:69044354-69044380; SpCas9
cacatgtctctgaagaagtgaga

SEQ ID NO: 41656 - DNA, 22 bp, Artificial Sequence
  Synthetic: FXN 3 reverse 9:69044355-69044380; SpCas9
acatgtctctgaagaagtgaga

SEQ ID NO: 41657 - DNA, 21 bp, Artificial Sequence
  Synthetic: FXN 3 reverse 9:69044356-69044380; SpCas9
catgtctctgaagaagtgaga

SEQ ID NO: 41658 - DNA, 20 bp, Artificial Sequence
  Synthetic: FXN 3 reverse 9:69044357-69044380; SpCas9
atgtctctgaagaagtgaga

SEQ ID NO: 41659 - DNA, 19 bp, Artificial Sequence
  Synthetic: FXN 3 reverse 9:69044358-69044380; SpCas9
tgtctctgaagaagtgaga

SEQ ID NO: 41660 - DNA, 18 bp, Artificial Sequence
  Synthetic: FXN 3 reverse 9:69044359-69044380; SpCas9
gtctctgaagaagtgaga

SEQ ID NO: 41661 - DNA, 25 bp, Artificial Sequence
  Synthetic: FXN 3 reverse 9:69044353-69044381; SpCas9
aaacacatgtctctgaagaagtgag

SEQ ID NO: 41662 - DNA, 24 bp, Artificial Sequence
  Synthetic: FXN 3 reverse 9:69044354-69044381; SpCas9
aacacatgtctctgaagaagtgag

SEQ ID NO: 41663 - DNA, 23 bp, Artificial Sequence
  Synthetic: FXN 3 reverse 9:69044355-69044381; SpCas9
acacatgtctctgaagaagtgag

SEQ ID NO: 41664 - DNA, 22 bp, Artificial Sequence
  Synthetic: FXN 3 reverse 9:69044356-69044381; SpCas9
cacatgtctctgaagaagtgag

SEQ ID NO: 41665 - DNA, 21 bp, Artificial Sequence
  Synthetic: FXN 3 reverse 9:69044357-69044381; SpCas9
acatgtctctgaagaagtgag

SEQ ID NO: 41666 - DNA, 20 bp, Artificial Sequence
  Synthetic: FXN 3 reverse 9:69044358-69044381; SpCas9
catgtctctgaagaagtgag

SEQ ID NO: 41667 - DNA, 19 bp, Artificial Sequence
  Synthetic: FXN 3 reverse 9:69044359-69044381; SpCas9
atgtctctgaagaagtgag

SEQ ID NO: 41668 - DNA, 18 bp, Artificial Sequence
  Synthetic: FXN 3 reverse 9:69044360-69044381; SpCas9
tgtctctgaagaagtgag

SEQ ID NO: 41669 - DNA, 25 bp, Artificial Sequence
  Synthetic: FXN 3 reverse 9:69044354-69044382; SpCas9
gaaacacatgtctctgaagaagtga

SEQ ID NO: 41670 - DNA, 24 bp, Artificial Sequence
  Synthetic: FXN 3 reverse 9:69044355-69044382; SpCas9
aaacacatgtctctgaagaagtga

SEQ ID NO: 41671 - DNA, 23 bp, Artificial Sequence
  Synthetic: FXN 3 reverse 9:69044356-69044382; SpCas9
aacacatgtctctgaagaagtga

SEQ ID NO: 41672 - DNA, 22 bp, Artificial Sequence
  Synthetic: FXN 3 reverse 9:69044357-69044382; SpCas9
acacatgtctctgaagaagtga

SEQ ID NO: 41673 - DNA, 21 bp, Artificial Sequence
  Synthetic: FXN 3 reverse 9:69044358-69044382; SpCas9
cacatgtctctgaagaagtga

SEQ ID NO: 41674 - DNA, 20 bp, Artificial Sequence
  Synthetic: FXN 3 reverse 9:69044359-69044382; SpCas9
acatgtctctgaagaagtga

SEQ ID NO: 41675 - DNA, 19 bp, Artificial Sequence
  Synthetic: FXN 3 reverse 9:69044360-69044382; SpCas9
catgtctctgaagaagtga

SEQ ID NO: 41676 - DNA, 18 bp, Artificial Sequence
  Synthetic: FXN 3 reverse 9:69044361-69044382; SpCas9
atgtctctgaagaagtga

SEQ ID NO: 41677 - DNA, 25 bp, Artificial Sequence
  Synthetic: FXN 3 reverse 9:69044356-69044384; SpCas9
tagaaacacatgtctctgaagaagt

SEQ ID NO: 41678 - DNA, 24 bp, Artificial Sequence
  Synthetic: FXN 3 reverse 9:69044357-69044384; SpCas9
agaaacacatgtctctgaagaagt

SEQ ID NO: 41679 - DNA, 23 bp, Artificial Sequence
  Synthetic: FXN 3 reverse 9:69044358-69044384; SpCas9
gaaacacatgtctctgaagaagt

SEQ ID NO: 41680 - DNA, 22 bp, Artificial Sequence
  Synthetic: FXN 3 reverse 9:69044359-69044384; SpCas9
aaacacatgtctctgaagaagt

SEQ ID NO: 41681 - DNA, 21 bp, Artificial Sequence
  Synthetic: FXN 3 reverse 9:69044360-69044384; SpCas9
aacacatgtctctgaagaagt

SEQ ID NO: 41682 - DNA, 20 bp, Artificial Sequence
  Synthetic: FXN 3 reverse 9:69044361-69044384; SpCas9
acacatgtctctgaagaagt

SEQ ID NO: 41683 - DNA, 19 bp, Artificial Sequence
  Synthetic: FXN 3 reverse 9:69044362-69044384; SpCas9
cacatgtctctgaagaagt

SEQ ID NO: 41684 - DNA, 18 bp, Artificial Sequence
  Synthetic: FXN 3 reverse 9:69044363-69044384; SpCas9
acatgtctctgaagaagt

SEQ ID NO: 41685 - DNA, 25 bp, Artificial Sequence
  Synthetic: FXN 3 forward 9:69044358-69044386; SpCas9
cacttcttcagagacatgtgtttct

SEQ ID NO: 41686 - DNA, 24 bp, Artificial Sequence
  Synthetic: FXN 3 forward 9:69044359-69044386; SpCas9
acttcttcagagacatgtgtttct

SEQ ID NO: 41687 - DNA, 23 bp, Artificial Sequence
  Synthetic: FXN 3 forward 9:69044360-69044386; SpCas9
cttcttcagagacatgtgtttct

SEQ ID NO: 41688 - DNA, 22 bp, Artificial Sequence
  Synthetic: FXN 3 forward 9:69044361-69044386; SpCas9
ttcttcagagacatgtgtttct

SEQ ID NO: 41689 - DNA, 21 bp, Artificial Sequence
  Synthetic: FXN 3 forward 9:69044362-69044386; SpCas9
tcttcagagacatgtgtttct

SEQ ID NO: 41690 - DNA, 20 bp, Artificial Sequence
  Synthetic: FXN 3 forward 9:69044363-69044386; SpCas9
cttcagagacatgtgtttct

SEQ ID NO: 41691 - DNA, 19 bp, Artificial Sequence
  Synthetic: FXN 3 forward 9:69044364-69044386; SpCas9
ttcagagacatgtgtttct

SEQ ID NO: 41692 - DNA, 18 bp, Artificial Sequence
  Synthetic: FXN 3 forward 9:69044365-69044386; SpCas9
tcagagacatgtgtttct

SEQ ID NO: 41693 - DNA, 25 bp, Artificial Sequence
  Synthetic: FXN 3 forward 9:69044359-69044387; SpCas9
acttcttcagagacatgtgtttcta

SEQ ID NO: 41694 - DNA, 24 bp, Artificial Sequence
  Synthetic: FXN 3 forward 9:69044360-69044387; SpCas9
cttcttcagagacatgtgtttcta

SEQ ID NO: 41695 - DNA, 23 bp, Artificial Sequence
  Synthetic: FXN 3 forward 9:69044361-69044387; SpCas9
ttcttcagagacatgtgtttcta

SEQ ID NO: 41696 - DNA, 22 bp, Artificial Sequence
  Synthetic: FXN 3 forward 9:69044362-69044387; SpCas9
tcttcagagacatgtgtttcta

SEQ ID NO: 41697 - DNA, 21 bp, Artificial Sequence
  Synthetic: FXN 3 forward 9:69044363-69044387; SpCas9
cttcagagacatgtgtttcta

SEQ ID NO: 41698 - DNA, 20 bp, Artificial Sequence
  Synthetic: FXN 3 forward 9:69044364-69044387; SpCas9
ttcagagacatgtgtttcta

SEQ ID NO: 41699 - DNA, 19 bp, Artificial Sequence
  Synthetic: FXN 3 forward 9:69044365-69044387; SpCas9
tcagagacatgtgtttcta

SEQ ID NO: 41700 - DNA, 18 bp, Artificial Sequence
  Synthetic: FXN 3 forward 9:69044366-69044387; SpCas9
cagagacatgtgtttcta

SEQ ID NO: 41701 - DNA, 25 bp, Artificial Sequence
  Synthetic: FXN 3 reverse 9:69044360-69044388; SpCas9
accttagaaacacatgtctctgaag

SEQ ID NO: 41702 - DNA, 24 bp, Artificial Sequence
  Synthetic: FXN 3 reverse 9:69044361-69044388; SpCas9
ccttagaaacacatgtctctgaag

SEQ ID NO: 41703 - DNA, 23 bp, Artificial Sequence
  Synthetic: FXN 3 reverse 9:69044362-69044388; SpCas9
cttagaaacacatgtctctgaag

SEQ ID NO: 41704 - DNA, 22 bp, Artificial Sequence
  Synthetic: FXN 3 reverse 9:69044363-69044388; SpCas9
ttagaaacacatgtctctgaag

SEQ ID NO: 41705 - DNA, 21 bp, Artificial Sequence
  Synthetic: FXN 3 reverse 9:69044364-69044388; SpCas9
tagaaacacatgtctctgaag

SEQ ID NO: 41706 - DNA, 20 bp, Artificial Sequence
  Synthetic: FXN 3 reverse 9:69044365-69044388; SpCas9
agaaacacatgtctctgaag

SEQ ID NO: 41707 - DNA, 19 bp, Artificial Sequence
  Synthetic: FXN 3 reverse 9:69044366-69044388; SpCas9
gaaacacatgtctctgaag

SEQ ID NO: 41708 - DNA, 18 bp, Artificial Sequence
  Synthetic: FXN 3 reverse 9:69044367-69044388; SpCas9
aaacacatgtctctgaag

SEQ ID NO: 41709 - DNA, 25 bp, Artificial Sequence
  Synthetic: FXN 3 reverse 9:69044363-69044391; SpCas9
cagaccttagaaacacatgtctctg

SEQ ID NO: 41710 - DNA, 24 bp, Artificial Sequence
  Synthetic: FXN 3 reverse 9:69044364-69044391; SpCas9
agaccttagaaacacatgtctctg

SEQ ID NO: 41711 - DNA, 23 bp, Artificial Sequence
  Synthetic: FXN 3 reverse 9:69044365-69044391; SpCas9
gaccttagaaacacatgtctctg

SEQ ID NO: 41712 - DNA, 22 bp, Artificial Sequence
  Synthetic: FXN 3 reverse 9:69044366-69044391; SpCas9
accttagaaacacatgtctctg

SEQ ID NO: 41713 - DNA, 21 bp, Artificial Sequence
  Synthetic: FXN 3 reverse 9:69044367-69044391; SpCas9
ccttagaaacacatgtctctg

SEQ ID NO: 41714 - DNA, 20 bp, Artificial Sequence
  Synthetic: FXN 3 reverse 9:69044368-69044391; SpCas9
cttagaaacacatgtctctg

SEQ ID NO: 41715 - DNA, 19 bp, Artificial Sequence
  Synthetic: FXN 3 reverse 9:69044369-69044391; SpCas9
ttagaaacacatgtctctg

SEQ ID NO: 41716 - DNA, 18 bp, Artificial Sequence
  Synthetic: FXN 3 reverse 9:69044370-69044391; SpCas9
tagaaacacatgtctctg

SEQ ID NO: 41717 - DNA, 25 bp, Artificial Sequence
  Synthetic: FXN 3 reverse 9:69044381-69044409; SpCas9
ggagggtggggcagagtgcagacct

SEQ ID NO: 41718 - DNA, 24 bp, Artificial Sequence
  Synthetic: FXN 3 reverse 9:69044382-69044409; SpCas9
gagggtggggcagagtgcagacct

SEQ ID NO: 41719 - DNA, 23 bp, Artificial Sequence
  Synthetic: FXN 3 reverse 9:69044383-69044409; SpCas9
agggtggggcagagtgcagacct

SEQ ID NO: 41720 - DNA, 22 bp, Artificial Sequence
  Synthetic: FXN 3 reverse 9:69044384-69044409; SpCas9
gggtggggcagagtgcagacct

SEQ ID NO: 41721 - DNA, 21 bp, Artificial Sequence
  Synthetic: FXN 3 reverse 9:69044385-69044409; SpCas9
ggtggggcagagtgcagacct

SEQ ID NO: 41722 - DNA, 20 bp, Artificial Sequence
  Synthetic: FXN 3 reverse 9:69044386-69044409; SpCas9
gtggggcagagtgcagacct

SEQ ID NO: 41723 - DNA, 19 bp, Artificial Sequence
  Synthetic: FXN 3 reverse 9:69044387-69044409; SpCas9
tggggcagagtgcagacct

SEQ ID NO: 41724 - DNA, 18 bp, Artificial Sequence
  Synthetic: FXN 3 reverse 9:69044388-69044409; SpCas9
ggggcagagtgcagacct

SEQ ID NO: 41725 - DNA, 25 bp, Artificial Sequence
  Synthetic: FXN 3 reverse 9:69044388-69044416; SpCas9
tggatggggagggtggggcagagtg

SEQ ID NO: 41726 - DNA, 24 bp, Artificial Sequence
  Synthetic: FXN 3 reverse 9:69044389-69044416; SpCas9
ggatggggagggtggggcagagtg

SEQ ID NO: 41727 - DNA, 23 bp, Artificial Sequence
  Synthetic: FXN 3 reverse 9:69044390-69044416; SpCas9
gatggggagggtggggcagagtg

SEQ ID NO: 41728 - DNA, 22 bp, Artificial Sequence
  Synthetic: FXN 3 reverse 9:69044391-69044416; SpCas9
atggggagggtggggcagagtg

SEQ ID NO: 41729 - DNA, 21 bp, Artificial Sequence
  Synthetic: FXN 3 reverse 9:69044392-69044416; SpCas9
tggggagggtggggcagagtg

SEQ ID NO: 41730 - DNA, 20 bp, Artificial Sequence
  Synthetic: FXN 3 reverse 9:69044393-69044416; SpCas9
ggggagggtggggcagagtg

SEQ ID NO: 41731 - DNA, 19 bp, Artificial Sequence
  Synthetic: FXN 3 reverse 9:69044394-69044416; SpCas9
gggagggtggggcagagtg

SEQ ID NO: 41732 - DNA, 18 bp, Artificial Sequence
  Synthetic: FXN 3 reverse 9:69044395-69044416; SpCas9
ggagggtggggcagagtg

SEQ ID NO: 41733 - DNA, 25 bp, Artificial Sequence
  Synthetic: FXN 3 reverse 9:69044393-69044421; SpCas9
gacagtggatggggagggtggggca

SEQ ID NO: 41734 - DNA, 24 bp, Artificial Sequence
  Synthetic: FXN 3 reverse 9:69044394-69044421; SpCas9
acagtggatggggagggtggggca

SEQ ID NO: 41735 - DNA, 23 bp, Artificial Sequence
  Synthetic: FXN 3 reverse 9:69044395-69044421; SpCas9
cagtggatggggagggtggggca

SEQ ID NO: 41736 - DNA, 22 bp, Artificial Sequence
  Synthetic: FXN 3 reverse 9:69044396-69044421; SpCas9
agtggatggggagggtggggca

SEQ ID NO: 41737 - DNA, 21 bp, Artificial Sequence
  Synthetic: FXN 3 reverse 9:69044397-69044421; SpCas9
gtggatggggagggtggggca

SEQ ID NO: 41738 - DNA, 20 bp, Artificial Sequence
  Synthetic: FXN 3 reverse 9:69044398-69044421; SpCas9
tggatggggagggtggggca

SEQ ID NO: 41739 - DNA, 19 bp, Artificial Sequence
  Synthetic: FXN 3 reverse 9:69044399-69044421; SpCas9
ggatggggagggtggggca

SEQ ID NO: 41740 - DNA, 18 bp, Artificial Sequence
  Synthetic: FXN 3 reverse 9:69044400-69044421; SpCas9
gatggggagggtggggca

SEQ ID NO: 41741 - DNA, 25 bp, Artificial Sequence
  Synthetic: FXN 3 reverse 9:69044395-69044423; SpCas9
gggacagtggatggggagggtgggg

SEQ ID NO: 41742 - DNA, 24 bp, Artificial Sequence
  Synthetic: FXN 3 reverse 9:69044396-69044423; SpCas9
ggacagtggatggggagggtgggg

SEQ ID NO: 41743 - DNA, 23 bp, Artificial Sequence
  Synthetic: FXN 3 reverse 9:69044397-69044423; SpCas9
gacagtggatggggagggtgggg

SEQ ID NO: 41744 - DNA, 22 bp, Artificial Sequence
  Synthetic: FXN 3 reverse 9:69044398-69044423; SpCas9
acagtggatggggagggtgggg

SEQ ID NO: 41745 - DNA, 21 bp, Artificial Sequence
  Synthetic: FXN 3 reverse 9:69044399-69044423; SpCas9
cagtggatggggagggtgggg

SEQ ID NO: 41746 - DNA, 20 bp, Artificial Sequence
  Synthetic: FXN 3 reverse 9:69044400-69044423; SpCas9
agtggatggggagggtgggg

SEQ ID NO: 41747 - DNA, 19 bp, Artificial Sequence
  Synthetic: FXN 3 reverse 9:69044401-69044423; SpCas9
gtggatggggagggtgggg

SEQ ID NO: 41748 - DNA, 18 bp, Artificial Sequence
  Synthetic: FXN 3 reverse 9:69044402-69044423; SpCas9
tggatggggagggtgggg

SEQ ID NO: 41749 - DNA, 25 bp, Artificial Sequence
  Synthetic: FXN 3 reverse 9:69044398-69044426; SpCas9
tgggggacagtggatggggagggtg

SEQ ID NO: 41750 - DNA, 24 bp, Artificial Sequence
  Synthetic: FXN 3 reverse 9:69044399-69044426; SpCas9
gggggacagtggatggggagggtg

SEQ ID NO: 41751 - DNA, 23 bp, Artificial Sequence
  Synthetic: FXN 3 reverse 9:69044400-69044426; SpCas9
ggggacagtggatggggagggtg

SEQ ID NO: 41752 - DNA, 22 bp, Artificial Sequence
  Synthetic: FXN 3 reverse 9:69044401-69044426; SpCas9
gggacagtggatggggagggtg

SEQ ID NO: 41753 - DNA, 21 bp, Artificial Sequence
  Synthetic: FXN 3 reverse 9:69044402-69044426; SpCas9
ggacagtggatggggagggtg

SEQ ID NO: 41754 - DNA, 20 bp, Artificial Sequence
  Synthetic: FXN 3 reverse 9:69044403-69044426; SpCas9
gacagtggatggggagggtg

SEQ ID NO: 41755 - DNA, 19 bp, Artificial Sequence
  Synthetic: FXN 3 reverse 9:69044404-69044426; SpCas9
acagtggatggggagggtg

SEQ ID NO: 41756 - DNA, 18 bp, Artificial Sequence
  Synthetic: FXN 3 reverse 9:69044405-69044426; SpCas9
cagtggatggggagggtg

SEQ ID NO: 41757 - DNA, 25 bp, Artificial Sequence
  Synthetic: FXN 3 forward 9:69044399-69044427; SpCas9
cccaccctccccatccactgtcccc

SEQ ID NO: 41758 - DNA, 24 bp, Artificial Sequence
  Synthetic: FXN 3 forward 9:69044400-69044427; SpCas9
ccaccctccccatccactgtcccc

SEQ ID NO: 41759 - DNA, 23 bp, Artificial Sequence
  Synthetic: FXN 3 forward 9:69044401-69044427; SpCas9
caccctccccatccactgtcccc

SEQ ID NO: 41760 - DNA, 22 bp, Artificial Sequence
  Synthetic: FXN 3 forward 9:69044402-69044427; SpCas9
accctccccatccactgtcccc

SEQ ID NO: 41761 - DNA, 21 bp, Artificial Sequence
  Synthetic: FXN 3 forward 9:69044403-69044427; SpCas9
ccctccccatccactgtcccc

SEQ ID NO: 41762 - DNA, 20 bp, Artificial Sequence
  Synthetic: FXN 3 forward 9:69044404-69044427; SpCas9
cctccccatccactgtcccc

SEQ ID NO: 41763 - DNA, 19 bp, Artificial Sequence
  Synthetic: FXN 3 forward 9:69044405-69044427; SpCas9
ctccccatccactgtcccc

SEQ ID NO: 41764 - DNA, 18 bp, Artificial Sequence
  Synthetic: FXN 3 forward 9:69044406-69044427; SpCas9
tccccatccactgtcccc

SEQ ID NO: 41765 - DNA, 25 bp, Artificial Sequence
  Synthetic: FXN 3 reverse 9:69044399-69044427; SpCas9
ctgggggacagtggatggggagggt

SEQ ID NO: 41766 - DNA, 24 bp, Artificial Sequence
  Synthetic: FXN 3 reverse 9:69044400-69044427; SpCas9
tgggggacagtggatggggagggt

SEQ ID NO: 41767 - DNA, 23 bp, Artificial Sequence
  Synthetic: FXN 3 reverse 9:69044401-69044427; SpCas9
gggggacagtggatggggagggt

SEQ ID NO: 41768 - DNA, 22 bp, Artificial Sequence
  Synthetic: FXN 3 reverse 9:69044402-69044427; SpCas9
ggggacagtggatggggagggt

SEQ ID NO: 41769 - DNA, 21 bp, Artificial Sequence
  Synthetic: FXN 3 reverse 9:69044403-69044427; SpCas9
gggacagtggatggggagggt

SEQ ID NO: 41770 - DNA, 20 bp, Artificial Sequence
  Synthetic: FXN 3 reverse 9:69044404-69044427; SpCas9
ggacagtggatggggagggt

SEQ ID NO: 41771 - DNA, 19 bp, Artificial Sequence
  Synthetic: FXN 3 reverse 9:69044405-69044427; SpCas9
gacagtggatggggagggt

SEQ ID NO: 41772 - DNA, 18 bp, Artificial Sequence
  Synthetic: FXN 3 reverse 9:69044406-69044427; SpCas9
acagtggatggggagggt

SEQ ID NO: 41773 - DNA, 25 bp, Artificial Sequence
  Synthetic: FXN 3 reverse 9:69044400-69044428; SpCas9
gctgggggacagtggatggggaggg

SEQ ID NO: 41774 - DNA, 24 bp, Artificial Sequence
  Synthetic: FXN 3 reverse 9:69044401-69044428; SpCas9
ctgggggacagtggatggggaggg

SEQ ID NO: 41775 - DNA, 23 bp, Artificial Sequence
  Synthetic: FXN 3 reverse 9:69044402-69044428; SpCas9
tgggggacagtggatggggaggg

SEQ ID NO: 41776 - DNA, 22 bp, Artificial Sequence
  Synthetic: FXN 3 reverse 9:69044403-69044428; SpCas9
gggggacagtggatggggaggg

SEQ ID NO: 41777 - DNA, 21 bp, Artificial Sequence
  Synthetic: FXN 3 reverse 9:69044404-69044428; SpCas9
ggggacagtggatggggaggg

SEQ ID NO: 41778 - DNA, 20 bp, Artificial Sequence
  Synthetic: FXN 3 reverse 9:69044405-69044428; SpCas9
gggacagtggatggggaggg

SEQ ID NO: 41779 - DNA, 19 bp, Artificial Sequence
  Synthetic: FXN 3 reverse 9:69044406-69044428; SpCas9
ggacagtggatggggaggg

SEQ ID NO: 41780 - DNA, 18 bp, Artificial Sequence
  Synthetic: FXN 3 reverse 9:69044407-69044428; SpCas9
gacagtggatggggaggg

SEQ ID NO: 41781 - DNA, 25 bp, Artificial Sequence
  Synthetic: FXN 3 reverse 9:69044403-69044431; SpCas9
cgggctgggggacagtggatgggga

SEQ ID NO: 41782 - DNA, 24 bp, Artificial Sequence
  Synthetic: FXN 3 reverse 9:69044404-69044431; SpCas9
gggctgggggacagtggatgggga

SEQ ID NO: 41783 - DNA, 23 bp, Artificial Sequence
  Synthetic: FXN 3 reverse 9:69044405-69044431; SpCas9
ggctgggggacagtggatgggga

SEQ ID NO: 41784 - DNA, 22 bp, Artificial Sequence
  Synthetic: FXN 3 reverse 9:69044406-69044431; SpCas9
gctgggggacagtggatgggga

SEQ ID NO: 41785 - DNA, 21 bp, Artificial Sequence
  Synthetic: FXN 3 reverse 9:69044407-69044431; SpCas9
ctgggggacagtggatgggga

SEQ ID NO: 41786 - DNA, 20 bp, Artificial Sequence
  Synthetic: FXN 3 reverse 9:69044408-69044431; SpCas9
tgggggacagtggatgggga

SEQ ID NO: 41787 - DNA, 19 bp, Artificial Sequence
  Synthetic: FXN 3 reverse 9:69044409-69044431; SpCas9
gggggacagtggatgggga

SEQ ID NO: 41788 - DNA, 18 bp, Artificial Sequence
  Synthetic: FXN 3 reverse 9:69044410-69044431; SpCas9
ggggacagtggatgggga

SEQ ID NO: 41789 - DNA, 25 bp, Artificial Sequence
  Synthetic: FXN 3 reverse 9:69044404-69044432; SpCas9
acgggctgggggacagtggatgggg

SEQ ID NO: 41790 - DNA, 24 bp, Artificial Sequence
  Synthetic: FXN 3 reverse 9:69044405-69044432; SpCas9
cgggctgggggacagtggatgggg

SEQ ID NO: 41791 - DNA, 23 bp, Artificial Sequence
  Synthetic: FXN 3 reverse 9:69044406-69044432; SpCas9
gggctgggggacagtggatgggg

SEQ ID NO: 41792 - DNA, 22 bp, Artificial Sequence
  Synthetic: FXN 3 reverse 9:69044407-69044432; SpCas9
ggctgggggacagtggatgggg

SEQ ID NO: 41793 - DNA, 21 bp, Artificial Sequence
  Synthetic: FXN 3 reverse 9:69044408-69044432; SpCas9
gctgggggacagtggatgggg

SEQ ID NO: 41794 - DNA, 20 bp, Artificial Sequence
  Synthetic: FXN 3 reverse 9:69044409-69044432; SpCas9
ctgggggacagtggatgggg

SEQ ID NO: 41795 - DNA, 19 bp, Artificial Sequence
  Synthetic: FXN 3 reverse 9:69044410-69044432; SpCas9
tgggggacagtggatgggg

SEQ ID NO: 41796 - DNA, 18 bp, Artificial Sequence
  Synthetic: FXN 3 reverse 9:69044411-69044432; SpCas9
gggggacagtggatgggg

SEQ ID NO: 41797 - DNA, 25 bp, Artificial Sequence
  Synthetic: FXN 3 reverse 9:69044405-69044433; SpCas9
aacgggctgggggacagtggatggg

SEQ ID NO: 41798 - DNA, 24 bp, Artificial Sequence
  Synthetic: FXN 3 reverse 9:69044406-69044433; SpCas9
acgggctgggggacagtggatggg

SEQ ID NO: 41799 - DNA, 23 bp, Artificial Sequence
  Synthetic: FXN 3 reverse 9:69044407-69044433; SpCas9
cgggctgggggacagtggatggg

SEQ ID NO: 41800 - DNA, 22 bp, Artificial Sequence
  Synthetic: FXN 3 reverse 9:69044408-69044433; SpCas9
gggctgggggacagtggatggg

SEQ ID NO: 41801 - DNA, 21 bp, Artificial Sequence
  Synthetic: FXN 3 reverse 9:69044409-69044433; SpCas9
ggctgggggacagtggatggg

SEQ ID NO: 41802 - DNA, 20 bp, Artificial Sequence
  Synthetic: FXN 3 reverse 9:69044410-69044433; SpCas9
gctgggggacagtggatggg

SEQ ID NO: 41803 - DNA, 19 bp, Artificial Sequence
  Synthetic: FXN 3 reverse 9:69044411-69044433; SpCas9
ctgggggacagtggatggg

SEQ ID NO: 41804 - DNA, 18 bp, Artificial Sequence
  Synthetic: FXN 3 reverse 9:69044412-69044433; SpCas9
tgggggacagtggatggg

SEQ ID NO: 41805 - DNA, 25 bp, Artificial Sequence
  Synthetic: FXN 3 reverse 9:69044407-69044435; SpCas9
gaaacgggctgggggacagtggatg

SEQ ID NO: 41806 - DNA, 24 bp, Artificial Sequence
  Synthetic: FXN 3 reverse 9:69044408-69044435; SpCas9
aaacgggctgggggacagtggatg

SEQ ID NO: 41807 - DNA, 23 bp, Artificial Sequence
  Synthetic: FXN 3 reverse 9:69044409-69044435; SpCas9
aacgggctgggggacagtggatg

SEQ ID NO: 41808 - DNA, 22 bp, Artificial Sequence
  Synthetic: FXN 3 reverse 9:69044410-69044435; SpCas9
acgggctgggggacagtggatg

SEQ ID NO: 41809 - DNA, 21 bp, Artificial Sequence
  Synthetic: FXN 3 reverse 9:69044411-69044435; SpCas9
cgggctgggggacagtggatg

SEQ ID NO: 41810 - DNA, 20 bp, Artificial Sequence
  Synthetic: FXN 3 reverse 9:69044412-69044435; SpCas9
gggctgggggacagtggatg

SEQ ID NO: 41811 - DNA, 19 bp, Artificial Sequence
  Synthetic: FXN 3 reverse 9:69044413-69044435; SpCas9
ggctgggggacagtggatg

SEQ ID NO: 41812 - DNA, 18 bp, Artificial Sequence
  Synthetic: FXN 3 reverse 9:69044414-69044435; SpCas9
gctgggggacagtggatg

SEQ ID NO: 41813 - DNA, 25 bp, Artificial Sequence
  Synthetic: FXN 3 reverse 9:69044408-69044436; SpCas9
ggaaacgggctgggggacagtggat

SEQ ID NO: 41814 - DNA, 24 bp, Artificial Sequence
  Synthetic: FXN 3 reverse 9:69044409-69044436; SpCas9
gaaacgggctgggggacagtggat

SEQ ID NO: 41815 - DNA, 23 bp, Artificial Sequence
  Synthetic: FXN 3 reverse 9:69044410-69044436; SpCas9
aaacgggctgggggacagtggat

SEQ ID NO: 41816 - DNA, 22 bp, Artificial Sequence
  Synthetic: FXN 3 reverse 9:69044411-69044436; SpCas9
aacgggctgggggacagtggat

SEQ ID NO: 41817 - DNA, 21 bp, Artificial Sequence
  Synthetic: FXN 3 reverse 9:69044412-69044436; SpCas9
acgggctgggggacagtggat

SEQ ID NO: 41818 - DNA, 20 bp, Artificial Sequence
  Synthetic: FXN 3 reverse 9:69044413-69044436; SpCas9
cgggctgggggacagtggat

SEQ ID NO: 41819 - DNA, 19 bp, Artificial Sequence
  Synthetic: FXN 3 reverse 9:69044414-69044436; SpCas9
gggctgggggacagtggat

SEQ ID NO: 41820 - DNA, 18 bp, Artificial Sequence
  Synthetic: FXN 3 reverse 9:69044415-69044436; SpCas9
ggctgggggacagtggat

SEQ ID NO: 41821 - DNA, 25 bp, Artificial Sequence
  Synthetic: FXN 3 reverse 9:69044409-69044437; SpCas9
aggaaacgggctgggggacagtgga

SEQ ID NO: 41822 - DNA, 24 bp, Artificial Sequence
  Synthetic: FXN 3 reverse 9:69044410-69044437; SpCas9
ggaaacgggctgggggacagtgga

SEQ ID NO: 41823 - DNA, 23 bp, Artificial Sequence
  Synthetic: FXN 3 reverse 9:69044411-69044437; SpCas9
gaaacgggctgggggacagtgga

SEQ ID NO: 41824 - DNA, 22 bp, Artificial Sequence
  Synthetic: FXN 3 reverse 9:69044412-69044437; SpCas9
aaacgggctgggggacagtgga

SEQ ID NO: 41825 - DNA, 21 bp, Artificial Sequence
  Synthetic: FXN 3 reverse 9:69044413-69044437; SpCas9
aacgggctgggggacagtgga

SEQ ID NO: 41826 - DNA, 20 bp, Artificial Sequence
  Synthetic: FXN 3 reverse 9:69044414-69044437; SpCas9
acgggctgggggacagtgga

SEQ ID NO: 41827 - DNA, 19 bp, Artificial Sequence
  Synthetic: FXN 3 reverse 9:69044415-69044437; SpCas9
cgggctgggggacagtgga

SEQ ID NO: 41828 - DNA, 18 bp, Artificial Sequence
  Synthetic: FXN 3 reverse 9:69044416-69044437; SpCas9
gggctgggggacagtgga

SEQ ID NO: 41829 - DNA, 25 bp, Artificial Sequence
  Synthetic: FXN 3 reverse 9:69044413-69044441; SpCas9
gaggaggaaacgggctgggggacag

SEQ ID NO: 41830 - DNA, 24 bp, Artificial Sequence
  Synthetic: FXN 3 reverse 9:69044414-69044441; SpCas9
aggaggaaacgggctgggggacag

SEQ ID NO: 41831 - DNA, 23 bp, Artificial Sequence
  Synthetic: FXN 3 reverse 9:69044415-69044441; SpCas9
ggaggaaacgggctgggggacag

SEQ ID NO: 41832 - DNA, 22 bp, Artificial Sequence
  Synthetic: FXN 3 reverse 9:69044416-69044441; SpCas9
gaggaaacgggctgggggacag

SEQ ID NO: 41833 - DNA, 21 bp, Artificial Sequence
  Synthetic: FXN 3 reverse 9:69044417-69044441; SpCas9
aggaaacgggctgggggacag

SEQ ID NO: 41834 - DNA, 20 bp, Artificial Sequence
  Synthetic: FXN 3 reverse 9:69044418-69044441; SpCas9
ggaaacgggctgggggacag

SEQ ID NO: 41835 - DNA, 19 bp, Artificial Sequence
  Synthetic: FXN 3 reverse 9:69044419-69044441; SpCas9
gaaacgggctgggggacag

SEQ ID NO: 41836 - DNA, 18 bp, Artificial Sequence
  Synthetic: FXN 3 reverse 9:69044420-69044441; SpCas9
aaacgggctgggggacag

SEQ ID NO: 41837 - DNA, 25 bp, Artificial Sequence
  Synthetic: FXN 3 reverse 9:69044416-69044444; SpCas9
gtggaggaggaaacgggctggggga

SEQ ID NO: 41838 - DNA, 24 bp, Artificial Sequence
  Synthetic: FXN 3 reverse 9:69044417-69044444; SpCas9
tggaggaggaaacgggctggggga

SEQ ID NO: 41839 - DNA, 23 bp, Artificial Sequence
  Synthetic: FXN 3 reverse 9:69044418-69044444; SpCas9
ggaggaggaaacgggctggggga

SEQ ID NO: 41840 - DNA, 22 bp, Artificial Sequence
  Synthetic: FXN 3 reverse 9:69044419-69044444; SpCas9
gaggaggaaacgggctggggga

SEQ ID NO: 41841 - DNA, 21 bp, Artificial Sequence
  Synthetic: FXN 3 reverse 9:69044420-69044444; SpCas9
aggaggaaacgggctggggga

SEQ ID NO: 41842 - DNA, 20 bp, Artificial Sequence
  Synthetic: FXN 3 reverse 9:69044421-69044444; SpCas9
ggaggaaacgggctggggga

SEQ ID NO: 41843 - DNA, 19 bp, Artificial Sequence
  Synthetic: FXN 3 reverse 9:69044422-69044444; SpCas9
gaggaaacgggctggggga

SEQ ID NO: 41844 - DNA, 18 bp, Artificial Sequence
  Synthetic: FXN 3 reverse 9:69044423-69044444; SpCas9
aggaaacgggctggggga

SEQ ID NO: 41845 - DNA, 25 bp, Artificial Sequence
  Synthetic: FXN 3 reverse 9:69044420-69044448; SpCas9
gtaagtggaggaggaaacgggctgg

SEQ ID NO: 41846 - DNA, 24 bp, Artificial Sequence
  Synthetic: FXN 3 reverse 9:69044421-69044448; SpCas9
taagtggaggaggaaacgggctgg

SEQ ID NO: 41847 - DNA, 23 bp, Artificial Sequence
  Synthetic: FXN 3 reverse 9:69044422-69044448; SpCas9
aagtggaggaggaaacgggctgg

SEQ ID NO: 41848 - DNA, 22 bp, Artificial Sequence
  Synthetic: FXN 3 reverse 9:69044423-69044448; SpCas9
agtggaggaggaaacgggctgg

SEQ ID NO: 41849 - DNA, 21 bp, Artificial Sequence
  Synthetic: FXN 3 reverse 9:69044424-69044448; SpCas9
gtggaggaggaaacgggctgg

SEQ ID NO: 41850 - DNA, 20 bp, Artificial Sequence
  Synthetic: FXN 3 reverse 9:69044425-69044448; SpCas9
tggaggaggaaacgggctgg

SEQ ID NO: 41851 - DNA, 19 bp, Artificial Sequence
  Synthetic: FXN 3 reverse 9:69044426-69044448; SpCas9
ggaggaggaaacgggctgg

SEQ ID NO: 41852 - DNA, 18 bp, Artificial Sequence
  Synthetic: FXN 3 reverse 9:69044427-69044448; SpCas9
gaggaggaaacgggctgg

SEQ ID NO: 41853 - DNA, 25 bp, Artificial Sequence
  Synthetic: FXN 3 reverse 9:69044421-69044449; SpCas9
agtaagtggaggaggaaacgggctg

SEQ ID NO: 41854 - DNA, 24 bp, Artificial Sequence
  Synthetic: FXN 3 reverse 9:69044422-69044449; SpCas9
gtaagtggaggaggaaacgggctg

SEQ ID NO: 41855 - DNA, 23 bp, Artificial Sequence
  Synthetic: FXN 3 reverse 9:69044423-69044449; SpCas9
taagtggaggaggaaacgggctg

SEQ ID NO: 41856 - DNA, 22 bp, Artificial Sequence
  Synthetic: FXN 3 reverse 9:69044424-69044449; SpCas9
aagtggaggaggaaacgggctg

SEQ ID NO: 41857 - DNA, 21 bp, Artificial Sequence
  Synthetic: FXN 3 reverse 9:69044425-69044449; SpCas9
agtggaggaggaaacgggctg

SEQ ID NO: 41858 - DNA, 20 bp, Artificial Sequence
  Synthetic: FXN 3 reverse 9:69044426-69044449; SpCas9
gtggaggaggaaacgggctg

SEQ ID NO: 41859 - DNA, 19 bp, Artificial Sequence
  Synthetic: FXN 3 reverse 9:69044427-69044449; SpCas9
tggaggaggaaacgggctg

SEQ ID NO: 41860 - DNA, 18 bp, Artificial Sequence
  Synthetic: FXN 3 reverse 9:69044428-69044449; SpCas9
ggaggaggaaacgggctg

SEQ ID NO: 41861 - DNA, 25 bp, Artificial Sequence
  Synthetic: FXN 3 reverse 9:69044422-69044450; SpCas9
aagtaagtggaggaggaaacgggct

SEQ ID NO: 41862 - DNA, 24 bp, Artificial Sequence
  Synthetic: FXN 3 reverse 9:69044423-69044450; SpCas9
agtaagtggaggaggaaacgggct

SEQ ID NO: 41863 - DNA, 23 bp, Artificial Sequence
  Synthetic: FXN 3 reverse 9:69044424-69044450; SpCas9
gtaagtggaggaggaaacgggct

SEQ ID NO: 41864 - DNA, 22 bp, Artificial Sequence
  Synthetic: FXN 3 reverse 9:69044425-69044450; SpCas9
taagtggaggaggaaacgggct

SEQ ID NO: 41865 - DNA, 21 bp, Artificial Sequence
  Synthetic: FXN 3 reverse 9:69044426-69044450; SpCas9
aagtggaggaggaaacgggct

SEQ ID NO: 41866 - DNA, 20 bp, Artificial Sequence
  Synthetic: FXN 3 reverse 9:69044427-69044450; SpCas9
agtggaggaggaaacgggct

SEQ ID NO: 41867 - DNA, 19 bp, Artificial Sequence
  Synthetic: FXN 3 reverse 9:69044428-69044450; SpCas9
gtggaggaggaaacgggct

SEQ ID NO: 41868 - DNA, 18 bp, Artificial Sequence
  Synthetic: FXN 3 reverse 9:69044429-69044450; SpCas9
tggaggaggaaacgggct

SEQ ID NO: 41869 - DNA, 25 bp, Artificial Sequence
  Synthetic: FXN 3 reverse 9:69044423-69044451; SpCas9
gaagtaagtggaggaggaaacgggc

SEQ ID NO: 41870 - DNA, 24 bp, Artificial Sequence
  Synthetic: FXN 3 reverse 9:69044424-69044451; SpCas9
aagtaagtggaggaggaaacgggc

SEQ ID NO: 41871 - DNA, 23 bp, Artificial Sequence
  Synthetic: FXN 3 reverse 9:69044425-69044451; SpCas9
agtaagtggaggaggaaacgggc

SEQ ID NO: 41872 - DNA, 22 bp, Artificial Sequence
  Synthetic: FXN 3 reverse 9:69044426-69044451; SpCas9
gtaagtggaggaggaaacgggc

SEQ ID NO: 41873 - DNA, 21 bp, Artificial Sequence
  Synthetic: FXN 3 reverse 9:69044427-69044451; SpCas9
taagtggaggaggaaacgggc

SEQ ID NO: 41874 - DNA, 20 bp, Artificial Sequence
  Synthetic: FXN 3 reverse 9:69044428-69044451; SpCas9
aagtggaggaggaaacgggc

SEQ ID NO: 41875 - DNA, 19 bp, Artificial Sequence
  Synthetic: FXN 3 reverse 9:69044429-69044451; SpCas9
agtggaggaggaaacgggc

SEQ ID NO: 41876 - DNA, 18 bp, Artificial Sequence
  Synthetic: FXN 3 reverse 9:69044430-69044451; SpCas9
gtggaggaggaaacgggc

SEQ ID NO: 41877 - DNA, 25 bp, Artificial Sequence
  Synthetic: FXN 3 forward 9:69044427-69044455; SpCas9
cccgtttcctcctccacttacttcc

SEQ ID NO: 41878 - DNA, 24 bp, Artificial Sequence
  Synthetic: FXN 3 forward 9:69044428-69044455; SpCas9
ccgtttcctcctccacttacttcc

SEQ ID NO: 41879 - DNA, 23 bp, Artificial Sequence
  Synthetic: FXN 3 forward 9:69044429-69044455; SpCas9
cgtttcctcctccacttacttcc

SEQ ID NO: 41880 - DNA, 22 bp, Artificial Sequence
  Synthetic: FXN 3 forward 9:69044430-69044455; SpCas9
gtttcctcctccacttacttcc

SEQ ID NO: 41881 - DNA, 21 bp, Artificial Sequence
  Synthetic: FXN 3 forward 9:69044431-69044455; SpCas9
tttcctcctccacttacttcc

SEQ ID NO: 41882 - DNA, 20 bp, Artificial Sequence
  Synthetic: FXN 3 forward 9:69044432-69044455; SpCas9
ttcctcctccacttacttcc

SEQ ID NO: 41883 - DNA, 19 bp, Artificial Sequence
  Synthetic: FXN 3 forward 9:69044433-69044455; SpCas9
tcctcctccacttacttcc

SEQ ID NO: 41884 - DNA, 18 bp, Artificial Sequence
  Synthetic: FXN 3 forward 9:69044434-69044455; SpCas9
cctcctccacttacttcc

SEQ ID NO: 41885 - DNA, 25 bp, Artificial Sequence
  Synthetic: FXN 3 reverse 9:69044427-69044455; SpCas9
ctgggaagtaagtggaggaggaaac

SEQ ID NO: 41886 - DNA, 24 bp, Artificial Sequence
  Synthetic: FXN 3 reverse 9:69044428-69044455; SpCas9
tgggaagtaagtggaggaggaaac

SEQ ID NO: 41887 - DNA, 23 bp, Artificial Sequence
  Synthetic: FXN 3 reverse 9:69044429-69044455; SpCas9
gggaagtaagtggaggaggaaac

SEQ ID NO: 41888 - DNA, 22 bp, Artificial Sequence
  Synthetic: FXN 3 reverse 9:69044430-69044455; SpCas9
ggaagtaagtggaggaggaaac

SEQ ID NO: 41889 - DNA, 21 bp, Artificial Sequence
  Synthetic: FXN 3 reverse 9:69044431-69044455; SpCas9
gaagtaagtggaggaggaaac

SEQ ID NO: 41890 - DNA, 20 bp, Artificial Sequence
  Synthetic: FXN 3 reverse 9:69044432-69044455; SpCas9
aagtaagtggaggaggaaac

SEQ ID NO: 41891 - DNA, 19 bp, Artificial Sequence
  Synthetic: FXN 3 reverse 9:69044433-69044455; SpCas9
agtaagtggaggaggaaac

SEQ ID NO: 41892 - DNA, 18 bp, Artificial Sequence
  Synthetic: FXN 3 reverse 9:69044434-69044455; SpCas9
gtaagtggaggaggaaac

SEQ ID NO: 41893 - DNA, 25 bp, Artificial Sequence
  Synthetic: FXN 3 reverse 9:69044428-69044456; SpCas9
gctgggaagtaagtggaggaggaaa

SEQ ID NO: 41894 - DNA, 24 bp, Artificial Sequence
  Synthetic: FXN 3 reverse 9:69044429-69044456; SpCas9
ctgggaagtaagtggaggaggaaa

SEQ ID NO: 41895 - DNA, 23 bp, Artificial Sequence
  Synthetic: FXN 3 reverse 9:69044430-69044456; SpCas9
tgggaagtaagtggaggaggaaa

SEQ ID NO: 41896 - DNA, 22 bp, Artificial Sequence
  Synthetic: FXN 3 reverse 9:69044431-69044456; SpCas9
gggaagtaagtggaggaggaaa

SEQ ID NO: 41897 - DNA, 21 bp, Artificial Sequence
  Synthetic: FXN 3 reverse 9:69044432-69044456; SpCas9
ggaagtaagtggaggaggaaa

SEQ ID NO: 41898 - DNA, 20 bp, Artificial Sequence
  Synthetic: FXN 3 reverse 9:69044433-69044456; SpCas9
gaagtaagtggaggaggaaa

SEQ ID NO: 41899 - DNA, 19 bp, Artificial Sequence
  Synthetic: FXN 3 reverse 9:69044434-69044456; SpCas9
aagtaagtggaggaggaaa

SEQ ID NO: 41900 - DNA, 18 bp, Artificial Sequence
  Synthetic: FXN 3 reverse 9:69044435-69044456; SpCas9
agtaagtggaggaggaaa

SEQ ID NO: 41901 - DNA, 25 bp, Artificial Sequence
  Synthetic: FXN 3 reverse 9:69044434-69044462; SpCas9
cacagggctgggaagtaagtggagg

SEQ ID NO: 41902 - DNA, 24 bp, Artificial Sequence
  Synthetic: FXN 3 reverse 9:69044435-69044462; SpCas9
acagggctgggaagtaagtggagg

SEQ ID NO: 41903 - DNA, 23 bp, Artificial Sequence
  Synthetic: FXN 3 reverse 9:69044436-69044462; SpCas9
cagggctgggaagtaagtggagg

SEQ ID NO: 41904 - DNA, 22 bp, Artificial Sequence
  Synthetic: FXN 3 reverse 9:69044437-69044462; SpCas9
agggctgggaagtaagtggagg

SEQ ID NO: 41905 - DNA, 21 bp, Artificial Sequence
  Synthetic: FXN 3 reverse 9:69044438-69044462; SpCas9
gggctgggaagtaagtggagg

SEQ ID NO: 41906 - DNA, 20 bp, Artificial Sequence
  Synthetic: FXN 3 reverse 9:69044439-69044462; SpCas9
ggctgggaagtaagtggagg

SEQ ID NO: 41907 - DNA, 19 bp, Artificial Sequence
  Synthetic: FXN 3 reverse 9:69044440-69044462; SpCas9
gctgggaagtaagtggagg

SEQ ID NO: 41908 - DNA, 18 bp, Artificial Sequence
  Synthetic: FXN 3 reverse 9:69044441-69044462; SpCas9
ctgggaagtaagtggagg

SEQ ID NO: 41909 - DNA, 25 bp, Artificial Sequence
  Synthetic: FXN 3 reverse 9:69044435-69044463; SpCas9
gcacagggctgggaagtaagtggag

SEQ ID NO: 41910 - DNA, 24 bp, Artificial Sequence
  Synthetic: FXN 3 reverse 9:69044436-69044463; SpCas9
cacagggctgggaagtaagtggag

SEQ ID NO: 41911 - DNA, 23 bp, Artificial Sequence
  Synthetic: FXN 3 reverse 9:69044437-69044463; SpCas9
acagggctgggaagtaagtggag

SEQ ID NO: 41912 - DNA, 22 bp, Artificial Sequence
  Synthetic: FXN 3 reverse 9:69044438-69044463; SpCas9
cagggctgggaagtaagtggag

SEQ ID NO: 41913 - DNA, 21 bp, Artificial Sequence
  Synthetic: FXN 3 reverse 9:69044439-69044463; SpCas9
agggctgggaagtaagtggag

SEQ ID NO: 41914 - DNA, 20 bp, Artificial Sequence
  Synthetic: FXN 3 reverse 9:69044440-69044463; SpCas9
gggctgggaagtaagtggag

SEQ ID NO: 41915 - DNA, 19 bp, Artificial Sequence
  Synthetic: FXN 3 reverse 9:69044441-69044463; SpCas9
ggctgggaagtaagtggag

SEQ ID NO: 41916 - DNA, 18 bp, Artificial Sequence
  Synthetic: FXN 3 reverse 9:69044442-69044463; SpCas9
gctgggaagtaagtggag

SEQ ID NO: 41917 - DNA, 25 bp, Artificial Sequence
  Synthetic: FXN 3 reverse 9:69044437-69044465; SpCas9
aggcacagggctgggaagtaagtgg

SEQ ID NO: 41918 - DNA, 24 bp, Artificial Sequence
  Synthetic: FXN 3 reverse 9:69044438-69044465; SpCas9
ggcacagggctgggaagtaagtgg

SEQ ID NO: 41919 - DNA, 23 bp, Artificial Sequence
  Synthetic: FXN 3 reverse 9:69044439-69044465; SpCas9
gcacagggctgggaagtaagtgg

SEQ ID NO: 41920 - DNA, 22 bp, Artificial Sequence
  Synthetic: FXN 3 reverse 9:69044440-69044465; SpCas9
cacagggctgggaagtaagtgg

SEQ ID NO: 41921 - DNA, 21 bp, Artificial Sequence
  Synthetic: FXN 3 reverse 9:69044441-69044465; SpCas9
acagggctgggaagtaagtgg

SEQ ID NO: 41922 - DNA, 20 bp, Artificial Sequence
  Synthetic: FXN 3 reverse 9:69044442-69044465; SpCas9
cagggctgggaagtaagtgg

SEQ ID NO: 41923 - DNA, 19 bp, Artificial Sequence
  Synthetic: FXN 3 reverse 9:69044443-69044465; SpCas9
agggctgggaagtaagtgg

SEQ ID NO: 41924 - DNA, 18 bp, Artificial Sequence
  Synthetic: FXN 3 reverse 9:69044444-69044465; SpCas9
gggctgggaagtaagtgg

SEQ ID NO: 41925 - DNA, 25 bp, Artificial Sequence
  Synthetic: FXN 3 reverse 9:69044438-69044466; SpCas9
aaggcacagggctgggaagtaagtg

SEQ ID NO: 41926 - DNA, 24 bp, Artificial Sequence
  Synthetic: FXN 3 reverse 9:69044439-69044466; SpCas9
aggcacagggctgggaagtaagtg

SEQ ID NO: 41927 - DNA, 23 bp, Artificial Sequence
  Synthetic: FXN 3 reverse 9:69044440-69044466; SpCas9
ggcacagggctgggaagtaagtg

SEQ ID NO: 41928 - DNA, 22 bp, Artificial Sequence
  Synthetic: FXN 3 reverse 9:69044441-69044466; SpCas9
gcacagggctgggaagtaagtg

SEQ ID NO: 41929 - DNA, 21 bp, Artificial Sequence
  Synthetic: FXN 3 reverse 9:69044442-69044466; SpCas9
cacagggctgggaagtaagtg

SEQ ID NO: 41930 - DNA, 20 bp, Artificial Sequence
  Synthetic: FXN 3 reverse 9:69044443-69044466; SpCas9
acagggctgggaagtaagtg

SEQ ID NO: 41931 - DNA, 19 bp, Artificial Sequence
  Synthetic: FXN 3 reverse 9:69044444-69044466; SpCas9
cagggctgggaagtaagtg

SEQ ID NO: 41932 - DNA, 18 bp, Artificial Sequence
  Synthetic: FXN 3 reverse 9:69044445-69044466; SpCas9
agggctgggaagtaagtg

SEQ ID NO: 41933 - DNA, 25 bp, Artificial Sequence
  Synthetic: FXN 3 reverse 9:69044440-69044468; SpCas9
agaaggcacagggctgggaagtaag

SEQ ID NO: 41934 - DNA, 24 bp, Artificial Sequence
  Synthetic: FXN 3 reverse 9:69044441-69044468; SpCas9
gaaggcacagggctgggaagtaag

SEQ ID NO: 41935 - DNA, 23 bp, Artificial Sequence
  Synthetic: FXN 3 reverse 9:69044442-69044468; SpCas9
aaggcacagggctgggaagtaag

SEQ ID NO: 41936 - DNA, 22 bp, Artificial Sequence
  Synthetic: FXN 3 reverse 9:69044443-69044468; SpCas9
aggcacagggctgggaagtaag

SEQ ID NO: 41937 - DNA, 21 bp, Artificial Sequence
  Synthetic: FXN 3 reverse 9:69044444-69044468; SpCas9
ggcacagggctgggaagtaag

SEQ ID NO: 41938 - DNA, 20 bp, Artificial Sequence
  Synthetic: FXN 3 reverse 9:69044445-69044468; SpCas9
gcacagggctgggaagtaag

SEQ ID NO: 41939 - DNA, 19 bp, Artificial Sequence
  Synthetic: FXN 3 reverse 9:69044446-69044468; SpCas9
cacagggctgggaagtaag

SEQ ID NO: 41940 - DNA, 18 bp, Artificial Sequence
  Synthetic: FXN 3 reverse 9:69044447-69044468; SpCas9
acagggctgggaagtaag

SEQ ID NO: 41941 - DNA, 25 bp, Artificial Sequence
  Synthetic: FXN 3 reverse 9:69044443-69044471; SpCas9
ggcagaaggcacagggctgggaagt

SEQ ID NO: 41942 - DNA, 24 bp, Artificial Sequence
  Synthetic: FXN 3 reverse 9:69044444-69044471; SpCas9
gcagaaggcacagggctgggaagt

SEQ ID NO: 41943 - DNA, 23 bp, Artificial Sequence
  Synthetic: FXN 3 reverse 9:69044445-69044471; SpCas9
cagaaggcacagggctgggaagt

SEQ ID NO: 41944 - DNA, 22 bp, Artificial Sequence
  Synthetic: FXN 3 reverse 9:69044446-69044471; SpCas9
agaaggcacagggctgggaagt

SEQ ID NO: 41945 - DNA, 21 bp, Artificial Sequence
  Synthetic: FXN 3 reverse 9:69044447-69044471; SpCas9
gaaggcacagggctgggaagt

SEQ ID NO: 41946 - DNA, 20 bp, Artificial Sequence
  Synthetic: FXN 3 reverse 9:69044448-69044471; SpCas9
aaggcacagggctgggaagt

SEQ ID NO: 41947 - DNA, 19 bp, Artificial Sequence
  Synthetic: FXN 3 reverse 9:69044449-69044471; SpCas9
aggcacagggctgggaagt

SEQ ID NO: 41948 - DNA, 18 bp, Artificial Sequence
  Synthetic: FXN 3 reverse 9:69044450-69044471; SpCas9
ggcacagggctgggaagt

SEQ ID NO: 41949 - DNA, 25 bp, Artificial Sequence
  Synthetic: FXN 3 reverse 9:69044447-69044475; SpCas9
agaaggcagaaggcacagggctggg

SEQ ID NO: 41950 - DNA, 24 bp, Artificial Sequence
  Synthetic: FXN 3 reverse 9:69044448-69044475; SpCas9
gaaggcagaaggcacagggctggg

SEQ ID NO: 41951 - DNA, 23 bp, Artificial Sequence
  Synthetic: FXN 3 reverse 9:69044449-69044475; SpCas9
aaggcagaaggcacagggctggg

SEQ ID NO: 41952 - DNA, 22 bp, Artificial Sequence
  Synthetic: FXN 3 reverse 9:69044450-69044475; SpCas9
aggcagaaggcacagggctggg

SEQ ID NO: 41953 - DNA, 21 bp, Artificial Sequence
  Synthetic: FXN 3 reverse 9:69044451-69044475; SpCas9
ggcagaaggcacagggctggg

SEQ ID NO: 41954 - DNA, 20 bp, Artificial Sequence
  Synthetic: FXN 3 reverse 9:69044452-69044475; SpCas9
gcagaaggcacagggctggg

SEQ ID NO: 41955 - DNA, 19 bp, Artificial Sequence
  Synthetic: FXN 3 reverse 9:69044453-69044475; SpCas9
cagaaggcacagggctggg

SEQ ID NO: 41956 - DNA, 18 bp, Artificial Sequence
  Synthetic: FXN 3 reverse 9:69044454-69044475; SpCas9
agaaggcacagggctggg

SEQ ID NO: 41957 - DNA, 25 bp, Artificial Sequence
  Synthetic: FXN 3 reverse 9:69044450-69044478; SpCas9
aagagaaggcagaaggcacagggct

SEQ ID NO: 41958 - DNA, 24 bp, Artificial Sequence
  Synthetic: FXN 3 reverse 9:69044451-69044478; SpCas9
agagaaggcagaaggcacagggct

SEQ ID NO: 41959 - DNA, 23 bp, Artificial Sequence
  Synthetic: FXN 3 reverse 9:69044452-69044478; SpCas9
gagaaggcagaaggcacagggct

SEQ ID NO: 41960 - DNA, 22 bp, Artificial Sequence
  Synthetic: FXN 3 reverse 9:69044453-69044478; SpCas9
agaaggcagaaggcacagggct

SEQ ID NO: 41961 - DNA, 21 bp, Artificial Sequence
  Synthetic: FXN 3 reverse 9:69044454-69044478; SpCas9
gaaggcagaaggcacagggct

SEQ ID NO: 41962 - DNA, 20 bp, Artificial Sequence
  Synthetic: FXN 3 reverse 9:69044455-69044478; SpCas9
aaggcagaaggcacagggct

SEQ ID NO: 41963 - DNA, 19 bp, Artificial Sequence
  Synthetic: FXN 3 reverse 9:69044456-69044478; SpCas9
aggcagaaggcacagggct

SEQ ID NO: 41964 - DNA, 18 bp, Artificial Sequence
  Synthetic: FXN 3 reverse 9:69044457-69044478; SpCas9
ggcagaaggcacagggct

SEQ ID NO: 41965 - DNA, 25 bp, Artificial Sequence
  Synthetic: FXN 3 reverse 9:69044451-69044479; SpCas9
aaagagaaggcagaaggcacagggc

SEQ ID NO: 41966 - DNA, 24 bp, Artificial Sequence
  Synthetic: FXN 3 reverse 9:69044452-69044479; SpCas9
aagagaaggcagaaggcacagggc

SEQ ID NO: 41967 - DNA, 23 bp, Artificial Sequence
  Synthetic: FXN 3 reverse 9:69044453-69044479; SpCas9
agagaaggcagaaggcacagggc

SEQ ID NO: 41968 - DNA, 22 bp, Artificial Sequence
  Synthetic: FXN 3 reverse 9:69044454-69044479; SpCas9
gagaaggcagaaggcacagggc

SEQ ID NO: 41969 - DNA, 21 bp, Artificial Sequence
  Synthetic: FXN 3 reverse 9:69044455-69044479; SpCas9
agaaggcagaaggcacagggc

SEQ ID NO: 41970 - DNA, 20 bp, Artificial Sequence
  Synthetic: FXN 3 reverse 9:69044456-69044479; SpCas9
gaaggcagaaggcacagggc

SEQ ID NO: 41971 - DNA, 19 bp, Artificial Sequence
  Synthetic: FXN 3 reverse 9:69044457-69044479; SpCas9
aaggcagaaggcacagggc

SEQ ID NO: 41972 - DNA, 18 bp, Artificial Sequence
  Synthetic: FXN 3 reverse 9:69044458-69044479; SpCas9
aggcagaaggcacagggc

SEQ ID NO: 41973 - DNA, 25 bp, Artificial Sequence
  Synthetic: FXN 3 reverse 9:69044455-69044483; SpCas9
cagaaaagagaaggcagaaggcaca

SEQ ID NO: 41974 - DNA, 24 bp, Artificial Sequence
  Synthetic: FXN 3 reverse 9:69044456-69044483; SpCas9
agaaaagagaaggcagaaggcaca

SEQ ID NO: 41975 - DNA, 23 bp, Artificial Sequence
  Synthetic: FXN 3 reverse 9:69044457-69044483; SpCas9
gaaaagagaaggcagaaggcaca

SEQ ID NO: 41976 - DNA, 22 bp, Artificial Sequence
  Synthetic: FXN 3 reverse 9:69044458-69044483; SpCas9
aaaagagaaggcagaaggcaca

SEQ ID NO: 41977 - DNA, 21 bp, Artificial Sequence
  Synthetic: FXN 3 reverse 9:69044459-69044483; SpCas9
aaagagaaggcagaaggcaca

SEQ ID NO: 41978 - DNA, 20 bp, Artificial Sequence
  Synthetic: FXN 3 reverse 9:69044460-69044483; SpCas9
aagagaaggcagaaggcaca

SEQ ID NO: 41979 - DNA, 19 bp, Artificial Sequence
  Synthetic: FXN 3 reverse 9:69044461-69044483; SpCas9
agagaaggcagaaggcaca

SEQ ID NO: 41980 - DNA, 18 bp, Artificial Sequence
  Synthetic: FXN 3 reverse 9:69044462-69044483; SpCas9
gagaaggcagaaggcaca

SEQ ID NO: 41981 - DNA, 25 bp, Artificial Sequence
  Synthetic: FXN 3 reverse 9:69044456-69044484; SpCas9
tcagaaaagagaaggcagaaggcac

SEQ ID NO: 41982 - DNA, 24 bp, Artificial Sequence
  Synthetic: FXN 3 reverse 9:69044457-69044484; SpCas9
cagaaaagagaaggcagaaggcac

SEQ ID NO: 41983 - DNA, 23 bp, Artificial Sequence
  Synthetic: FXN 3 reverse 9:69044458-69044484; SpCas9
agaaaagagaaggcagaaggcac

SEQ ID NO: 41984 - DNA, 22 bp, Artificial Sequence
  Synthetic: FXN 3 reverse 9:69044459-69044484; SpCas9
gaaaagagaaggcagaaggcac

SEQ ID NO: 41985 - DNA, 21 bp, Artificial Sequence
  Synthetic: FXN 3 reverse 9:69044460-69044484; SpCas9
aaaagagaaggcagaaggcac

SEQ ID NO: 41986 - DNA, 20 bp, Artificial Sequence
  Synthetic: FXN 3 reverse 9:69044461-69044484; SpCas9
aaagagaaggcagaaggcac

SEQ ID NO: 41987 - DNA, 19 bp, Artificial Sequence
  Synthetic: FXN 3 reverse 9:69044462-69044484; SpCas9
aagagaaggcagaaggcac

SEQ ID NO: 41988 - DNA, 18 bp, Artificial Sequence
  Synthetic: FXN 3 reverse 9:69044463-69044484; SpCas9
agagaaggcagaaggcac

SEQ ID NO: 41989 - DNA, 25 bp, Artificial Sequence
  Synthetic: FXN 3 forward 9:69044457-69044485; SpCas9
ctgtgccttctgccttctcttttct

SEQ ID NO: 41990 - DNA, 24 bp, Artificial Sequence
  Synthetic: FXN 3 forward 9:69044458-69044485; SpCas9
tgtgccttctgccttctcttttct

SEQ ID NO: 41991 - DNA, 23 bp, Artificial Sequence
  Synthetic: FXN 3 forward 9:69044459-69044485; SpCas9
gtgccttctgccttctcttttct

SEQ ID NO: 41992 - DNA, 22 bp, Artificial Sequence
  Synthetic: FXN 3 forward 9:69044460-69044485; SpCas9
tgccttctgccttctcttttct

SEQ ID NO: 41993 - DNA, 21 bp, Artificial Sequence
  Synthetic: FXN 3 forward 9:69044461-69044485; SpCas9
gccttctgccttctcttttct

SEQ ID NO: 41994 - DNA, 20 bp, Artificial Sequence
  Synthetic: FXN 3 forward 9:69044462-69044485; SpCas9
ccttctgccttctcttttct

SEQ ID NO: 41995 - DNA, 19 bp, Artificial Sequence
  Synthetic: FXN 3 forward 9:69044463-69044485; SpCas9
cttctgccttctcttttct

SEQ ID NO: 41996 - DNA, 18 bp, Artificial Sequence
  Synthetic: FXN 3 forward 9:69044464-69044485; SpCas9
ttctgccttctcttttct

SEQ ID NO: 41997 - DNA, 25 bp, Artificial Sequence
  Synthetic: FXN 3 reverse 9:69044457-69044485; SpCas9
ctcagaaaagagaaggcagaaggca

SEQ ID NO: 41998 - DNA, 24 bp, Artificial Sequence
  Synthetic: FXN 3 reverse 9:69044458-69044485; SpCas9
tcagaaaagagaaggcagaaggca

SEQ ID NO: 41999 - DNA, 23 bp, Artificial Sequence
  Synthetic: FXN 3 reverse 9:69044459-69044485; SpCas9
cagaaaagagaaggcagaaggca

SEQ ID NO: 42000 - DNA, 22 bp, Artificial Sequence
  Synthetic: FXN 3 reverse 9:69044460-69044485; SpCas9
agaaaagagaaggcagaaggca

SEQ ID NO: 42001 - DNA, 21 bp, Artificial Sequence
  Synthetic: FXN 3 reverse 9:69044461-69044485; SpCas9
gaaaagagaaggcagaaggca

SEQ ID NO: 42002 - DNA, 20 bp, Artificial Sequence
  Synthetic: FXN 3 reverse 9:69044462-69044485; SpCas9
aaaagagaaggcagaaggca

SEQ ID NO: 42003 - DNA, 19 bp, Artificial Sequence
  Synthetic: FXN 3 reverse 9:69044463-69044485; SpCas9
aaagagaaggcagaaggca

SEQ ID NO: 42004 - DNA, 18 bp, Artificial Sequence
  Synthetic: FXN 3 reverse 9:69044464-69044485; SpCas9
aagagaaggcagaaggca

SEQ ID NO: 42005 - DNA, 25 bp, Artificial Sequence
  Synthetic: FXN 3 reverse 9:69044462-69044490; SpCas9
gcaaactcagaaaagagaaggcaga

SEQ ID NO: 42006 - DNA, 24 bp, Artificial Sequence
  Synthetic: FXN 3 reverse 9:69044463-69044490; SpCas9
caaactcagaaaagagaaggcaga

SEQ ID NO: 42007 - DNA, 23 bp, Artificial Sequence
  Synthetic: FXN 3 reverse 9:69044464-69044490; SpCas9
aaactcagaaaagagaaggcaga

SEQ ID NO: 42008 - DNA, 22 bp, Artificial Sequence
  Synthetic: FXN 3 reverse 9:69044465-69044490; SpCas9
aactcagaaaagagaaggcaga

SEQ ID NO: 42009 - DNA, 21 bp, Artificial Sequence
  Synthetic: FXN 3 reverse 9:69044466-69044490; SpCas9
actcagaaaagagaaggcaga

SEQ ID NO: 42010 - DNA, 20 bp, Artificial Sequence
  Synthetic: FXN 3 reverse 9:69044467-69044490; SpCas9
ctcagaaaagagaaggcaga

SEQ ID NO: 42011 - DNA, 19 bp, Artificial Sequence
  Synthetic: FXN 3 reverse 9:69044468-69044490; SpCas9
tcagaaaagagaaggcaga

SEQ ID NO: 42012 - DNA, 18 bp, Artificial Sequence
  Synthetic: FXN 3 reverse 9:69044469-69044490; SpCas9
cagaaaagagaaggcaga

SEQ ID NO: 42013 - DNA, 25 bp, Artificial Sequence
  Synthetic: FXN 3 reverse 9:69044463-69044491; SpCas9
agcaaactcagaaaagagaaggcag

SEQ ID NO: 42014 - DNA, 24 bp, Artificial Sequence
  Synthetic: FXN 3 reverse 9:69044464-69044491; SpCas9
gcaaactcagaaaagagaaggcag

SEQ ID NO: 42015 - DNA, 23 bp, Artificial Sequence
  Synthetic: FXN 3 reverse 9:69044465-69044491; SpCas9
caaactcagaaaagagaaggcag

SEQ ID NO: 42016 - DNA, 22 bp, Artificial Sequence
  Synthetic: FXN 3 reverse 9:69044466-69044491; SpCas9
aaactcagaaaagagaaggcag

SEQ ID NO: 42017 - DNA, 21 bp, Artificial Sequence
  Synthetic: FXN 3 reverse 9:69044467-69044491; SpCas9
aactcagaaaagagaaggcag

SEQ ID NO: 42018 - DNA, 20 bp, Artificial Sequence
  Synthetic: FXN 3 reverse 9:69044468-69044491; SpCas9
actcagaaaagagaaggcag

SEQ ID NO: 42019 - DNA, 19 bp, Artificial Sequence
  Synthetic: FXN 3 reverse 9:69044469-69044491; SpCas9
ctcagaaaagagaaggcag

SEQ ID NO: 42020 - DNA, 18 bp, Artificial Sequence
  Synthetic: FXN 3 reverse 9:69044470-69044491; SpCas9
tcagaaaagagaaggcag

SEQ ID NO: 42021 - DNA, 25 bp, Artificial Sequence
  Synthetic: FXN 3 forward 9:69044466-69044494; SpCas9
ctgccttctcttttctgagtttgct

SEQ ID NO: 42022 - DNA, 24 bp, Artificial Sequence
  Synthetic: FXN 3 forward 9:69044467-69044494; SpCas9
tgccttctcttttctgagtttgct

SEQ ID NO: 42023 - DNA, 23 bp, Artificial Sequence
  Synthetic: FXN 3 forward 9:69044468-69044494; SpCas9
gccttctcttttctgagtttgct

SEQ ID NO: 42024 - DNA, 22 bp, Artificial Sequence
  Synthetic: FXN 3 forward 9:69044469-69044494; SpCas9
ccttctcttttctgagtttgct

SEQ ID NO: 42025 - DNA, 21 bp, Artificial Sequence
  Synthetic: FXN 3 forward 9:69044470-69044494; SpCas9
cttctcttttctgagtttgct

SEQ ID NO: 42026 - DNA, 20 bp, Artificial Sequence
  Synthetic: FXN 3 forward 9:69044471-69044494; SpCas9
ttctcttttctgagtttgct

SEQ ID NO: 42027 - DNA, 19 bp, Artificial Sequence
  Synthetic: FXN 3 forward 9:69044472-69044494; SpCas9
tctcttttctgagtttgct

SEQ ID NO: 42028 - DNA, 18 bp, Artificial Sequence
  Synthetic: FXN 3 forward 9:69044473-69044494; SpCas9
ctcttttctgagtttgct

SEQ ID NO: 42029 - DNA, 25 bp, Artificial Sequence
  Synthetic: FXN 3 reverse 9:69044466-69044494; SpCas9
cttagcaaactcagaaaagagaagg

SEQ ID NO: 42030 - DNA, 24 bp, Artificial Sequence
  Synthetic: FXN 3 reverse 9:69044467-69044494; SpCas9
ttagcaaactcagaaaagagaagg

SEQ ID NO: 42031 - DNA, 23 bp, Artificial Sequence
  Synthetic: FXN 3 reverse 9:69044468-69044494; SpCas9
tagcaaactcagaaaagagaagg

SEQ ID NO: 42032 - DNA, 22 bp, Artificial Sequence
  Synthetic: FXN 3 reverse 9:69044469-69044494; SpCas9
agcaaactcagaaaagagaagg

SEQ ID NO: 42033 - DNA, 21 bp, Artificial Sequence
  Synthetic: FXN 3 reverse 9:69044470-69044494; SpCas9
gcaaactcagaaaagagaagg

SEQ ID NO: 42034 - DNA, 20 bp, Artificial Sequence
  Synthetic: FXN 3 reverse 9:69044471-69044494; SpCas9
caaactcagaaaagagaagg

SEQ ID NO: 42035 - DNA, 19 bp, Artificial Sequence
  Synthetic: FXN 3 reverse 9:69044472-69044494; SpCas9
aaactcagaaaagagaagg

SEQ ID NO: 42036 - DNA, 18 bp, Artificial Sequence
  Synthetic: FXN 3 reverse 9:69044473-69044494; SpCas9
aactcagaaaagagaagg

SEQ ID NO: 42037 - DNA, 25 bp, Artificial Sequence
  Synthetic: FXN 3 forward 9:69044467-69044495; SpCas9
tgccttctcttttctgagtttgcta

SEQ ID NO: 42038 - DNA, 24 bp, Artificial Sequence
  Synthetic: FXN 3 forward 9:69044468-69044495; SpCas9
gccttctcttttctgagtttgcta

SEQ ID NO: 42039 - DNA, 23 bp, Artificial Sequence
  Synthetic: FXN 3 forward 9:69044469-69044495; SpCas9
ccttctcttttctgagtttgcta

SEQ ID NO: 42040 - DNA, 22 bp, Artificial Sequence
  Synthetic: FXN 3 forward 9:69044470-69044495; SpCas9
cttctcttttctgagtttgcta

SEQ ID NO: 42041 - DNA, 21 bp, Artificial Sequence
  Synthetic: FXN 3 forward 9:69044471-69044495; SpCas9
ttctcttttctgagtttgcta

SEQ ID NO: 42042 - DNA, 20 bp, Artificial Sequence
  Synthetic: FXN 3 forward 9:69044472-69044495; SpCas9
tctcttttctgagtttgcta

SEQ ID NO: 42043 - DNA, 19 bp, Artificial Sequence
  Synthetic: FXN 3 forward 9:69044473-69044495; SpCas9
ctcttttctgagtttgcta

SEQ ID NO: 42044 - DNA, 18 bp, Artificial Sequence
  Synthetic: FXN 3 forward 9:69044474-69044495; SpCas9
tcttttctgagtttgcta

SEQ ID NO: 42045 - DNA, 25 bp, Artificial Sequence
  Synthetic: FXN 3 forward 9:69044468-69044496; SpCas9
gccttctcttttctgagtttgctaa

SEQ ID NO: 42046 - DNA, 24 bp, Artificial Sequence
  Synthetic: FXN 3 forward 9:69044469-69044496; SpCas9
ccttctcttttctgagtttgctaa

SEQ ID NO: 42047 - DNA, 23 bp, Artificial Sequence
  Synthetic: FXN 3 forward 9:69044470-69044496; SpCas9
cttctcttttctgagtttgctaa

SEQ ID NO: 42048 - DNA, 22 bp, Artificial Sequence
  Synthetic: FXN 3 forward 9:69044471-69044496; SpCas9
ttctcttttctgagtttgctaa

SEQ ID NO: 42049 - DNA, 21 bp, Artificial Sequence
  Synthetic: FXN 3 forward 9:69044472-69044496; SpCas9
tctcttttctgagtttgctaa

SEQ ID NO: 42050 - DNA, 20 bp, Artificial Sequence
  Synthetic: FXN 3 forward 9:69044473-69044496; SpCas9
ctcttttctgagtttgctaa

SEQ ID NO: 42051 - DNA, 19 bp, Artificial Sequence
  Synthetic: FXN 3 forward 9:69044474-69044496; SpCas9
tcttttctgagtttgctaa

SEQ ID NO: 42052 - DNA, 18 bp, Artificial Sequence
  Synthetic: FXN 3 forward 9:69044475-69044496; SpCas9
cttttctgagtttgctaa

SEQ ID NO: 42053 - DNA, 25 bp, Artificial Sequence
  Synthetic: FXN 3 reverse 9:69044469-69044497; SpCas9
gcccttagcaaactcagaaaagaga

SEQ ID NO: 42054 - DNA, 24 bp, Artificial Sequence
  Synthetic: FXN 3 reverse 9:69044470-69044497; SpCas9
cccttagcaaactcagaaaagaga

SEQ ID NO: 42055 - DNA, 23 bp, Artificial Sequence
  Synthetic: FXN 3 reverse 9:69044471-69044497; SpCas9
ccttagcaaactcagaaaagaga

SEQ ID NO: 42056 - DNA, 22 bp, Artificial Sequence
  Synthetic: FXN 3 reverse 9:69044472-69044497; SpCas9
cttagcaaactcagaaaagaga

SEQ ID NO: 42057 - DNA, 21 bp, Artificial Sequence
  Synthetic: FXN 3 reverse 9:69044473-69044497; SpCas9
ttagcaaactcagaaaagaga

SEQ ID NO: 42058 - DNA, 20 bp, Artificial Sequence
  Synthetic: FXN 3 reverse 9:69044474-69044497; SpCas9
tagcaaactcagaaaagaga

SEQ ID NO: 42059 - DNA, 19 bp, Artificial Sequence
  Synthetic: FXN 3 reverse 9:69044475-69044497; SpCas9
agcaaactcagaaaagaga

SEQ ID NO: 42060 - DNA, 18 bp, Artificial Sequence
  Synthetic: FXN 3 reverse 9:69044476-69044497; SpCas9
gcaaactcagaaaagaga

SEQ ID NO: 42061 - DNA, 25 bp, Artificial Sequence
  Synthetic: FXN 3 reverse 9:69044470-69044498; SpCas9
tgcccttagcaaactcagaaaagag

SEQ ID NO: 42062 - DNA, 24 bp, Artificial Sequence
  Synthetic: FXN 3 reverse 9:69044471-69044498; SpCas9
gcccttagcaaactcagaaaagag

SEQ ID NO: 42063 - DNA, 23 bp, Artificial Sequence
  Synthetic: FXN 3 reverse 9:69044472-69044498; SpCas9
cccttagcaaactcagaaaagag

SEQ ID NO: 42064 - DNA, 22 bp, Artificial Sequence
  Synthetic: FXN 3 reverse 9:69044473-69044498; SpCas9
ccttagcaaactcagaaaagag

SEQ ID NO: 42065 - DNA, 21 bp, Artificial Sequence
  Synthetic: FXN 3 reverse 9:69044474-69044498; SpCas9
cttagcaaactcagaaaagag

SEQ ID NO: 42066 - DNA, 20 bp, Artificial Sequence
  Synthetic: FXN 3 reverse 9:69044475-69044498; SpCas9
ttagcaaactcagaaaagag

SEQ ID NO: 42067 - DNA, 19 bp, Artificial Sequence
  Synthetic: FXN 3 reverse 9:69044476-69044498; SpCas9
tagcaaactcagaaaagag

SEQ ID NO: 42068 - DNA, 18 bp, Artificial Sequence
  Synthetic: FXN 3 reverse 9:69044477-69044498; SpCas9
agcaaactcagaaaagag

SEQ ID NO: 42069 - DNA, 25 bp, Artificial Sequence
  Synthetic: FXN 3 reverse 9:69044473-69044501; SpCas9
cagtgcccttagcaaactcagaaaa

SEQ ID NO: 42070 - DNA, 24 bp, Artificial Sequence
  Synthetic: FXN 3 reverse 9:69044474-69044501; SpCas9
agtgcccttagcaaactcagaaaa

SEQ ID NO: 42071 - DNA, 23 bp, Artificial Sequence
  Synthetic: FXN 3 reverse 9:69044475-69044501; SpCas9
gtgcccttagcaaactcagaaaa

SEQ ID NO: 42072 - DNA, 22 bp, Artificial Sequence
  Synthetic: FXN 3 reverse 9:69044476-69044501; SpCas9
tgcccttagcaaactcagaaaa

SEQ ID NO: 42073 - DNA, 21 bp, Artificial Sequence
  Synthetic: FXN 3 reverse 9:69044477-69044501; SpCas9
gcccttagcaaactcagaaaa

SEQ ID NO: 42074 - DNA, 20 bp, Artificial Sequence
  Synthetic: FXN 3 reverse 9:69044478-69044501; SpCas9
cccttagcaaactcagaaaa

SEQ ID NO: 42075 - DNA, 19 bp, Artificial Sequence
  Synthetic: FXN 3 reverse 9:69044479-69044501; SpCas9
ccttagcaaactcagaaaa

SEQ ID NO: 42076 - DNA, 18 bp, Artificial Sequence
  Synthetic: FXN 3 reverse 9:69044480-69044501; SpCas9
cttagcaaactcagaaaa

SEQ ID NO: 42077 - DNA, 25 bp, Artificial Sequence
  Synthetic: FXN 3 reverse 9:69044475-69044503; SpCas9
agcagtgcccttagcaaactcagaa

SEQ ID NO: 42078 - DNA, 24 bp, Artificial Sequence
  Synthetic: FXN 3 reverse 9:69044476-69044503; SpCas9
gcagtgcccttagcaaactcagaa

SEQ ID NO: 42079 - DNA, 23 bp, Artificial Sequence
  Synthetic: FXN 3 reverse 9:69044477-69044503; SpCas9
cagtgcccttagcaaactcagaa

SEQ ID NO: 42080 - DNA, 22 bp, Artificial Sequence
  Synthetic: FXN 3 reverse 9:69044478-69044503; SpCas9
agtgcccttagcaaactcagaa

SEQ ID NO: 42081 - DNA, 21 bp, Artificial Sequence
  Synthetic: FXN 3 reverse 9:69044479-69044503; SpCas9
gtgcccttagcaaactcagaa

SEQ ID NO: 42082 - DNA, 20 bp, Artificial Sequence
  Synthetic: FXN 3 reverse 9:69044480-69044503; SpCas9
tgcccttagcaaactcagaa

SEQ ID NO: 42083 - DNA, 19 bp, Artificial Sequence
  Synthetic: FXN 3 reverse 9:69044481-69044503; SpCas9
gcccttagcaaactcagaa

SEQ ID NO: 42084 - DNA, 18 bp, Artificial Sequence
  Synthetic: FXN 3 reverse 9:69044482-69044503; SpCas9
cccttagcaaactcagaa

SEQ ID NO: 42085 - DNA, 25 bp, Artificial Sequence
  Synthetic: FXN 3 forward 9:69044477-69044505; SpCas9
tttctgagtttgctaagggcactgc

SEQ ID NO: 42086 - DNA, 24 bp, Artificial Sequence
  Synthetic: FXN 3 forward 9:69044478-69044505; SpCas9
ttctgagtttgctaagggcactgc

SEQ ID NO: 42087 - DNA, 23 bp, Artificial Sequence
  Synthetic: FXN 3 forward 9:69044479-69044505; SpCas9
tctgagtttgctaagggcactgc

SEQ ID NO: 42088 - DNA, 22 bp, Artificial Sequence
  Synthetic: FXN 3 forward 9:69044480-69044505; SpCas9
ctgagtttgctaagggcactgc

SEQ ID NO: 42089 - DNA, 21 bp, Artificial Sequence
  Synthetic: FXN 3 forward 9:69044481-69044505; SpCas9
tgagtttgctaagggcactgc

SEQ ID NO: 42090 - DNA, 20 bp, Artificial Sequence
  Synthetic: FXN 3 forward 9:69044482-69044505; SpCas9
gagtttgctaagggcactgc

SEQ ID NO: 42091 - DNA, 19 bp, Artificial Sequence
  Synthetic: FXN 3 forward 9:69044483-69044505; SpCas9
agtttgctaagggcactgc

SEQ ID NO: 42092 - DNA, 18 bp, Artificial Sequence
  Synthetic: FXN 3 forward 9:69044484-69044505; SpCas9
gtttgctaagggcactgc

SEQ ID NO: 42093 - DNA, 25 bp, Artificial Sequence
  Synthetic: FXN 3 reverse 9:69044480-69044508; SpCas9
gagccagcagtgcccttagcaaact

SEQ ID NO: 42094 - DNA, 24 bp, Artificial Sequence
  Synthetic: FXN 3 reverse 9:69044481-69044508; SpCas9
agccagcagtgcccttagcaaact

SEQ ID NO: 42095 - DNA, 23 bp, Artificial Sequence
  Synthetic: FXN 3 reverse 9:69044482-69044508; SpCas9
gccagcagtgcccttagcaaact

SEQ ID NO: 42096 - DNA, 22 bp, Artificial Sequence
  Synthetic: FXN 3 reverse 9:69044483-69044508; SpCas9
ccagcagtgcccttagcaaact

SEQ ID NO: 42097 - DNA, 21 bp, Artificial Sequence
  Synthetic: FXN 3 reverse 9:69044484-69044508; SpCas9
cagcagtgcccttagcaaact

SEQ ID NO: 42098 - DNA, 20 bp, Artificial Sequence
  Synthetic: FXN 3 reverse 9:69044485-69044508; SpCas9
agcagtgcccttagcaaact

SEQ ID NO: 42099 - DNA, 19 bp, Artificial Sequence
  Synthetic: FXN 3 reverse 9:69044486-69044508; SpCas9
gcagtgcccttagcaaact

SEQ ID NO: 42100 - DNA, 18 bp, Artificial Sequence
  Synthetic: FXN 3 reverse 9:69044487-69044508; SpCas9
cagtgcccttagcaaact

SEQ ID NO: 42101 - DNA, 25 bp, Artificial Sequence
  Synthetic: FXN 3 forward 9:69044483-69044511; SpCas9
agtttgctaagggcactgctggctc

SEQ ID NO: 42102 - DNA, 24 bp, Artificial Sequence
  Synthetic: FXN 3 forward 9:69044484-69044511; SpCas9
gtttgctaagggcactgctggctc

SEQ ID NO: 42103 - DNA, 23 bp, Artificial Sequence
  Synthetic: FXN 3 forward 9:69044485-69044511; SpCas9
tttgctaagggcactgctggctc

SEQ ID NO: 42104 - DNA, 22 bp, Artificial Sequence
  Synthetic: FXN 3 forward 9:69044486-69044511; SpCas9
ttgctaagggcactgctggctc

SEQ ID NO: 42105 - DNA, 21 bp, Artificial Sequence
  Synthetic: FXN 3 forward 9:69044487-69044511; SpCas9
tgctaagggcactgctggctc

SEQ ID NO: 42106 - DNA, 20 bp, Artificial Sequence
  Synthetic: FXN 3 forward 9:69044488-69044511; SpCas9
gctaagggcactgctggctc

SEQ ID NO: 42107 - DNA, 19 bp, Artificial Sequence
  Synthetic: FXN 3 forward 9:69044489-69044511; SpCas9
ctaagggcactgctggctc

SEQ ID NO: 42108 - DNA, 18 bp, Artificial Sequence
  Synthetic: FXN 3 forward 9:69044490-69044511; SpCas9
taagggcactgctggctc

SEQ ID NO: 42109 - DNA, 25 bp, Artificial Sequence
  Synthetic: FXN 3 forward 9:69044485-69044513; SpCas9
tttgctaagggcactgctggctcaa

SEQ ID NO: 42110 - DNA, 24 bp, Artificial Sequence
  Synthetic: FXN 3 forward 9:69044486-69044513; SpCas9
ttgctaagggcactgctggctcaa

SEQ ID NO: 42111 - DNA, 23 bp, Artificial Sequence
  Synthetic: FXN 3 forward 9:69044487-69044513; SpCas9
tgctaagggcactgctggctcaa

SEQ ID NO: 42112 - DNA, 22 bp, Artificial Sequence
  Synthetic: FXN 3 forward 9:69044488-69044513; SpCas9
gctaagggcactgctggctcaa

SEQ ID NO: 42113 - DNA, 21 bp, Artificial Sequence
  Synthetic: FXN 3 forward 9:69044489-69044513; SpCas9
ctaagggcactgctggctcaa

SEQ ID NO: 42114 - DNA, 20 bp, Artificial Sequence
  Synthetic: FXN 3 forward 9:69044490-69044513; SpCas9
taagggcactgctggctcaa

SEQ ID NO: 42115 - DNA, 19 bp, Artificial Sequence
  Synthetic: FXN 3 forward 9:69044491-69044513; SpCas9
aagggcactgctggctcaa

SEQ ID NO: 42116 - DNA, 18 bp, Artificial Sequence
  Synthetic: FXN 3 forward 9:69044492-69044513; SpCas9
agggcactgctggctcaa

SEQ ID NO: 42117 - DNA, 25 bp, Artificial Sequence
  Synthetic: FXN 3 forward 9:69044488-69044516; SpCas9
gctaagggcactgctggctcaagag

SEQ ID NO: 42118 - DNA, 24 bp, Artificial Sequence
  Synthetic: FXN 3 forward 9:69044489-69044516; SpCas9
ctaagggcactgctggctcaagag

SEQ ID NO: 42119 - DNA, 23 bp, Artificial Sequence
  Synthetic: FXN 3 forward 9:69044490-69044516; SpCas9
taagggcactgctggctcaagag

SEQ ID NO: 42120 - DNA, 22 bp, Artificial Sequence
  Synthetic: FXN 3 forward 9:69044491-69044516; SpCas9
aagggcactgctggctcaagag

SEQ ID NO: 42121 - DNA, 21 bp, Artificial Sequence
  Synthetic: FXN 3 forward 9:69044492-69044516; SpCas9
agggcactgctggctcaagag

SEQ ID NO: 42122 - DNA, 20 bp, Artificial Sequence
  Synthetic: FXN 3 forward 9:69044493-69044516; SpCas9
gggcactgctggctcaagag

SEQ ID NO: 42123 - DNA, 19 bp, Artificial Sequence
  Synthetic: FXN 3 forward 9:69044494-69044516; SpCas9
ggcactgctggctcaagag

SEQ ID NO: 42124 - DNA, 18 bp, Artificial Sequence
  Synthetic: FXN 3 forward 9:69044495-69044516; SpCas9
gcactgctggctcaagag

SEQ ID NO: 42125 - DNA, 25 bp, Artificial Sequence
  Synthetic: FXN 3 reverse 9:69044489-69044517; SpCas9
actgctcttgagccagcagtgccct

SEQ ID NO: 42126 - DNA, 24 bp, Artificial Sequence
  Synthetic: FXN 3 reverse 9:69044490-69044517; SpCas9
ctgctcttgagccagcagtgccct

SEQ ID NO: 42127 - DNA, 23 bp, Artificial Sequence
  Synthetic: FXN 3 reverse 9:69044491-69044517; SpCas9
tgctcttgagccagcagtgccct

SEQ ID NO: 42128 - DNA, 22 bp, Artificial Sequence
  Synthetic: FXN 3 reverse 9:69044492-69044517; SpCas9
gctcttgagccagcagtgccct

SEQ ID NO: 42129 - DNA, 21 bp, Artificial Sequence
  Synthetic: FXN 3 reverse 9:69044493-69044517; SpCas9
ctcttgagccagcagtgccct

SEQ ID NO: 42130 - DNA, 20 bp, Artificial Sequence
  Synthetic: FXN 3 reverse 9:69044494-69044517; SpCas9
tcttgagccagcagtgccct

SEQ ID NO: 42131 - DNA, 19 bp, Artificial Sequence
  Synthetic: FXN 3 reverse 9:69044495-69044517; SpCas9
cttgagccagcagtgccct

SEQ ID NO: 42132 - DNA, 18 bp, Artificial Sequence
  Synthetic: FXN 3 reverse 9:69044496-69044517; SpCas9
ttgagccagcagtgccct

SEQ ID NO: 42133 - DNA, 25 bp, Artificial Sequence
  Synthetic: FXN 3 forward 9:69044498-69044526; SpCas9
ctgctggctcaagagcagtaactaa

SEQ ID NO: 42134 - DNA, 24 bp, Artificial Sequence
  Synthetic: FXN 3 forward 9:69044499-69044526; SpCas9
tgctggctcaagagcagtaactaa

SEQ ID NO: 42135 - DNA, 23 bp, Artificial Sequence
  Synthetic: FXN 3 forward 9:69044500-69044526; SpCas9
gctggctcaagagcagtaactaa

SEQ ID NO: 42136 - DNA, 22 bp, Artificial Sequence
  Synthetic: FXN 3 forward 9:69044501-69044526; SpCas9
ctggctcaagagcagtaactaa

SEQ ID NO: 42137 - DNA, 21 bp, Artificial Sequence
  Synthetic: FXN 3 forward 9:69044502-69044526; SpCas9
tggctcaagagcagtaactaa

SEQ ID NO: 42138 - DNA, 20 bp, Artificial Sequence
  Synthetic: FXN 3 forward 9:69044503-69044526; SpCas9
ggctcaagagcagtaactaa

SEQ ID NO: 42139 - DNA, 19 bp, Artificial Sequence
  Synthetic: FXN 3 forward 9:69044504-69044526; SpCas9
gctcaagagcagtaactaa

SEQ ID NO: 42140 - DNA, 18 bp, Artificial Sequence
  Synthetic: FXN 3 forward 9:69044505-69044526; SpCas9
ctcaagagcagtaactaa

SEQ ID NO: 42141 - DNA, 25 bp, Artificial Sequence
  Synthetic: FXN 3 reverse 9:69044498-69044526; SpCas9
ctgttagttactgctcttgagccag

SEQ ID NO: 42142 - DNA, 24 bp, Artificial Sequence
  Synthetic: FXN 3 reverse 9:69044499-69044526; SpCas9
tgttagttactgctcttgagccag

SEQ ID NO: 42143 - DNA, 23 bp, Artificial Sequence
  Synthetic: FXN 3 reverse 9:69044500-69044526; SpCas9
gttagttactgctcttgagccag

SEQ ID NO: 42144 - DNA, 22 bp, Artificial Sequence
  Synthetic: FXN 3 reverse 9:69044501-69044526; SpCas9
ttagttactgctcttgagccag

SEQ ID NO: 42145 - DNA, 21 bp, Artificial Sequence
  Synthetic: FXN 3 reverse 9:69044502-69044526; SpCas9
tagttactgctcttgagccag

SEQ ID NO: 42146 - DNA, 20 bp, Artificial Sequence
  Synthetic: FXN 3 reverse 9:69044503-69044526; SpCas9
agttactgctcttgagccag

SEQ ID NO: 42147 - DNA, 19 bp, Artificial Sequence
  Synthetic: FXN 3 reverse 9:69044504-69044526; SpCas9
gttactgctcttgagccag

SEQ ID NO: 42148 - DNA, 18 bp, Artificial Sequence
  Synthetic: FXN 3 reverse 9:69044505-69044526; SpCas9
ttactgctcttgagccag

SEQ ID NO: 42149 - DNA, 25 bp, Artificial Sequence
  Synthetic: FXN 3 reverse 9:69044501-69044529; SpCas9
agactgttagttactgctcttgagc

SEQ ID NO: 42150 - DNA, 24 bp, Artificial Sequence
  Synthetic: FXN 3 reverse 9:69044502-69044529; SpCas9
gactgttagttactgctcttgagc

SEQ ID NO: 42151 - DNA, 23 bp, Artificial Sequence
  Synthetic: FXN 3 reverse 9:69044503-69044529; SpCas9
actgttagttactgctcttgagc

SEQ ID NO: 42152 - DNA, 22 bp, Artificial Sequence
  Synthetic: FXN 3 reverse 9:69044504-69044529; SpCas9
ctgttagttactgctcttgagc

SEQ ID NO: 42153 - DNA, 21 bp, Artificial Sequence
  Synthetic: FXN 3 reverse 9:69044505-69044529; SpCas9
tgttagttactgctcttgagc

SEQ ID NO: 42154 - DNA, 20 bp, Artificial Sequence
  Synthetic: FXN 3 reverse 9:69044506-69044529; SpCas9
gttagttactgctcttgagc

SEQ ID NO: 42155 - DNA, 19 bp, Artificial Sequence
  Synthetic: FXN 3 reverse 9:69044507-69044529; SpCas9
ttagttactgctcttgagc

SEQ ID NO: 42156 - DNA, 18 bp, Artificial Sequence
  Synthetic: FXN 3 reverse 9:69044508-69044529; SpCas9
tagttactgctcttgagc

SEQ ID NO: 42157 - DNA, 25 bp, Artificial Sequence
  Synthetic: FXN 3 reverse 9:69044505-69044533; SpCas9
cgagagactgttagttactgctctt

SEQ ID NO: 42158 - DNA, 24 bp, Artificial Sequence
  Synthetic: FXN 3 reverse 9:69044506-69044533; SpCas9
gagagactgttagttactgctctt

SEQ ID NO: 42159 - DNA, 23 bp, Artificial Sequence
  Synthetic: FXN 3 reverse 9:69044507-69044533; SpCas9
agagactgttagttactgctctt

SEQ ID NO: 42160 - DNA, 22 bp, Artificial Sequence
  Synthetic: FXN 3 reverse 9:69044508-69044533; SpCas9
gagactgttagttactgctctt

SEQ ID NO: 42161 - DNA, 21 bp, Artificial Sequence
  Synthetic: FXN 3 reverse 9:69044509-69044533; SpCas9
agactgttagttactgctctt

SEQ ID NO: 42162 - DNA, 20 bp, Artificial Sequence
  Synthetic: FXN 3 reverse 9:69044510-69044533; SpCas9
gactgttagttactgctctt

SEQ ID NO: 42163 - DNA, 19 bp, Artificial Sequence
  Synthetic: FXN 3 reverse 9:69044511-69044533; SpCas9
actgttagttactgctctt

SEQ ID NO: 42164 - DNA, 18 bp, Artificial Sequence
  Synthetic: FXN 3 reverse 9:69044512-69044533; SpCas9
ctgttagttactgctctt

SEQ ID NO: 42165 - DNA, 25 bp, Artificial Sequence
  Synthetic: FXN 3 reverse 9:69044519-69044547; SpCas9
atggagagaagaggcgagagactgt

SEQ ID NO: 42166 - DNA, 24 bp, Artificial Sequence
  Synthetic: FXN 3 reverse 9:69044520-69044547; SpCas9
tggagagaagaggcgagagactgt

SEQ ID NO: 42167 - DNA, 23 bp, Artificial Sequence
  Synthetic: FXN 3 reverse 9:69044521-69044547; SpCas9
ggagagaagaggcgagagactgt

SEQ ID NO: 42168 - DNA, 22 bp, Artificial Sequence
  Synthetic: FXN 3 reverse 9:69044522-69044547; SpCas9
gagagaagaggcgagagactgt

SEQ ID NO: 42169 - DNA, 21 bp, Artificial Sequence
  Synthetic: FXN 3 reverse 9:69044523-69044547; SpCas9
agagaagaggcgagagactgt

SEQ ID NO: 42170 - DNA, 20 bp, Artificial Sequence
  Synthetic: FXN 3 reverse 9:69044524-69044547; SpCas9
gagaagaggcgagagactgt

SEQ ID NO: 42171 - DNA, 19 bp, Artificial Sequence
  Synthetic: FXN 3 reverse 9:69044525-69044547; SpCas9
agaagaggcgagagactgt

SEQ ID NO: 42172 - DNA, 18 bp, Artificial Sequence
  Synthetic: FXN 3 reverse 9:69044526-69044547; SpCas9
gaagaggcgagagactgt

SEQ ID NO: 42173 - DNA, 25 bp, Artificial Sequence
  Synthetic: FXN 3 forward 9:69044521-69044549; SpCas9
aacagtctctcgcctcttctctcca

SEQ ID NO: 42174 - DNA, 24 bp, Artificial Sequence
  Synthetic: FXN 3 forward 9:69044522-69044549; SpCas9
acagtctctcgcctcttctctcca

SEQ ID NO: 42175 - DNA, 23 bp, Artificial Sequence
  Synthetic: FXN 3 forward 9:69044523-69044549; SpCas9
cagtctctcgcctcttctctcca

SEQ ID NO: 42176 - DNA, 22 bp, Artificial Sequence
  Synthetic: FXN 3 forward 9:69044524-69044549; SpCas9
agtctctcgcctcttctctcca

SEQ ID NO: 42177 - DNA, 21 bp, Artificial Sequence
  Synthetic: FXN 3 forward 9:69044525-69044549; SpCas9
gtctctcgcctcttctctcca

SEQ ID NO: 42178 - DNA, 20 bp, Artificial Sequence
  Synthetic: FXN 3 forward 9:69044526-69044549; SpCas9
tctctcgcctcttctctcca

SEQ ID NO: 42179 - DNA, 19 bp, Artificial Sequence
  Synthetic: FXN 3 forward 9:69044527-69044549; SpCas9
ctctcgcctcttctctcca

SEQ ID NO: 42180 - DNA, 18 bp, Artificial Sequence
  Synthetic: FXN 3 forward 9:69044528-69044549; SpCas9
tctcgcctcttctctcca

SEQ ID NO: 42181 - DNA, 25 bp, Artificial Sequence
  Synthetic: FXN 3 reverse 9:69044527-69044555; SpCas9
tggttgccatggagagaagaggcga

SEQ ID NO: 42182 - DNA, 24 bp, Artificial Sequence
  Synthetic: FXN 3 reverse 9:69044528-69044555; SpCas9
ggttgccatggagagaagaggcga

SEQ ID NO: 42183 - DNA, 23 bp, Artificial Sequence
  Synthetic: FXN 3 reverse 9:69044529-69044555; SpCas9
gttgccatggagagaagaggcga

SEQ ID NO: 42184 - DNA, 22 bp, Artificial Sequence
  Synthetic: FXN 3 reverse 9:69044530-69044555; SpCas9
ttgccatggagagaagaggcga

SEQ ID NO: 42185 - DNA, 21 bp, Artificial Sequence
  Synthetic: FXN 3 reverse 9:69044531-69044555; SpCas9
tgccatggagagaagaggcga

SEQ ID NO: 42186 - DNA, 20 bp, Artificial Sequence
  Synthetic: FXN 3 reverse 9:69044532-69044555; SpCas9
gccatggagagaagaggcga

SEQ ID NO: 42187 - DNA, 19 bp, Artificial Sequence
  Synthetic: FXN 3 reverse 9:69044533-69044555; SpCas9
ccatggagagaagaggcga

SEQ ID NO: 42188 - DNA, 18 bp, Artificial Sequence
  Synthetic: FXN 3 reverse 9:69044534-69044555; SpCas9
catggagagaagaggcga

SEQ ID NO: 42189 - DNA, 25 bp, Artificial Sequence
  Synthetic: FXN 3 forward 9:69044528-69044556; SpCas9
tctcgcctcttctctccatggcaac

SEQ ID NO: 42190 - DNA, 24 bp, Artificial Sequence
  Synthetic: FXN 3 forward 9:69044529-69044556; SpCas9
ctcgcctcttctctccatggcaac

SEQ ID NO: 42191 - DNA, 23 bp, Artificial Sequence
  Synthetic: FXN 3 forward 9:69044530-69044556; SpCas9
tcgcctcttctctccatggcaac

SEQ ID NO: 42192 - DNA, 22 bp, Artificial Sequence
  Synthetic: FXN 3 forward 9:69044531-69044556; SpCas9
cgcctcttctctccatggcaac

SEQ ID NO: 42193 - DNA, 21 bp, Artificial Sequence
  Synthetic: FXN 3 forward 9:69044532-69044556; SpCas9
gcctcttctctccatggcaac

SEQ ID NO: 42194 - DNA, 20 bp, Artificial Sequence
  Synthetic: FXN 3 forward 9:69044533-69044556; SpCas9
cctcttctctccatggcaac

SEQ ID NO: 42195 - DNA, 19 bp, Artificial Sequence
  Synthetic: FXN 3 forward 9:69044534-69044556; SpCas9
ctcttctctccatggcaac

SEQ ID NO: 42196 - DNA, 18 bp, Artificial Sequence
  Synthetic: FXN 3 forward 9:69044535-69044556; SpCas9
tcttctctccatggcaac

SEQ ID NO: 42197 - DNA, 25 bp, Artificial Sequence
  Synthetic: FXN 3 reverse 9:69044529-69044557; SpCas9
actggttgccatggagagaagaggc

SEQ ID NO: 42198 - DNA, 24 bp, Artificial Sequence
  Synthetic: FXN 3 reverse 9:69044530-69044557; SpCas9
ctggttgccatggagagaagaggc

SEQ ID NO: 42199 - DNA, 23 bp, Artificial Sequence
  Synthetic: FXN 3 reverse 9:69044531-69044557; SpCas9
tggttgccatggagagaagaggc

SEQ ID NO: 42200 - DNA, 22 bp, Artificial Sequence
  Synthetic: FXN 3 reverse 9:69044532-69044557; SpCas9
ggttgccatggagagaagaggc

SEQ ID NO: 42201 - DNA, 21 bp, Artificial Sequence
  Synthetic: FXN 3 reverse 9:69044533-69044557; SpCas9
gttgccatggagagaagaggc

SEQ ID NO: 42202 - DNA, 20 bp, Artificial Sequence
  Synthetic: FXN 3 reverse 9:69044534-69044557; SpCas9
ttgccatggagagaagaggc

SEQ ID NO: 42203 - DNA, 19 bp, Artificial Sequence
  Synthetic: FXN 3 reverse 9:69044535-69044557; SpCas9
tgccatggagagaagaggc

SEQ ID NO: 42204 - DNA, 18 bp, Artificial Sequence
  Synthetic: FXN 3 reverse 9:69044536-69044557; SpCas9
gccatggagagaagaggc

SEQ ID NO: 42205 - DNA, 25 bp, Artificial Sequence
  Synthetic: FXN 3 reverse 9:69044533-69044561; SpCas9
ggtcactggttgccatggagagaag

SEQ ID NO: 42206 - DNA, 24 bp, Artificial Sequence
  Synthetic: FXN 3 reverse 9:69044534-69044561; SpCas9
gtcactggttgccatggagagaag

SEQ ID NO: 42207 - DNA, 23 bp, Artificial Sequence
  Synthetic: FXN 3 reverse 9:69044535-69044561; SpCas9
tcactggttgccatggagagaag

SEQ ID NO: 42208 - DNA, 22 bp, Artificial Sequence
  Synthetic: FXN 3 reverse 9:69044536-69044561; SpCas9
cactggttgccatggagagaag

SEQ ID NO: 42209 - DNA, 21 bp, Artificial Sequence
  Synthetic: FXN 3 reverse 9:69044537-69044561; SpCas9
actggttgccatggagagaag

SEQ ID NO: 42210 - DNA, 20 bp, Artificial Sequence
  Synthetic: FXN 3 reverse 9:69044538-69044561; SpCas9
ctggttgccatggagagaag

SEQ ID NO: 42211 - DNA, 19 bp, Artificial Sequence
  Synthetic: FXN 3 reverse 9:69044539-69044561; SpCas9
tggttgccatggagagaag

SEQ ID NO: 42212 - DNA, 18 bp, Artificial Sequence
  Synthetic: FXN 3 reverse 9:69044540-69044561; SpCas9
ggttgccatggagagaag

SEQ ID NO: 42213 - DNA, 25 bp, Artificial Sequence
  Synthetic: FXN 3 reverse 9:69044534-69044562; SpCas9
aggtcactggttgccatggagagaa

SEQ ID NO: 42214 - DNA, 24 bp, Artificial Sequence
  Synthetic: FXN 3 reverse 9:69044535-69044562; SpCas9
ggtcactggttgccatggagagaa

SEQ ID NO: 42215 - DNA, 23 bp, Artificial Sequence
  Synthetic: FXN 3 reverse 9:69044536-69044562; SpCas9
gtcactggttgccatggagagaa

SEQ ID NO: 42216 - DNA, 22 bp, Artificial Sequence
  Synthetic: FXN 3 reverse 9:69044537-69044562; SpCas9
tcactggttgccatggagagaa

SEQ ID NO: 42217 - DNA, 21 bp, Artificial Sequence
  Synthetic: FXN 3 reverse 9:69044538-69044562; SpCas9
cactggttgccatggagagaa

SEQ ID NO: 42218 - DNA, 20 bp, Artificial Sequence
  Synthetic: FXN 3 reverse 9:69044539-69044562; SpCas9
actggttgccatggagagaa

SEQ ID NO: 42219 - DNA, 19 bp, Artificial Sequence
  Synthetic: FXN 3 reverse 9:69044540-69044562; SpCas9
ctggttgccatggagagaa

SEQ ID NO: 42220 - DNA, 18 bp, Artificial Sequence
  Synthetic: FXN 3 reverse 9:69044541-69044562; SpCas9
tggttgccatggagagaa

SEQ ID NO: 42221 - DNA, 25 bp, Artificial Sequence
  Synthetic: FXN 3 reverse 9:69044536-69044564; SpCas9
aaaggtcactggttgccatggagag

SEQ ID NO: 42222 - DNA, 24 bp, Artificial Sequence
  Synthetic: FXN 3 reverse 9:69044537-69044564; SpCas9
aaggtcactggttgccatggagag

SEQ ID NO: 42223 - DNA, 23 bp, Artificial Sequence
  Synthetic: FXN 3 reverse 9:69044538-69044564; SpCas9
aggtcactggttgccatggagag

SEQ ID NO: 42224 - DNA, 22 bp, Artificial Sequence
  Synthetic: FXN 3 reverse 9:69044539-69044564; SpCas9
ggtcactggttgccatggagag

SEQ ID NO: 42225 - DNA, 21 bp, Artificial Sequence
  Synthetic: FXN 3 reverse 9:69044540-69044564; SpCas9
gtcactggttgccatggagag

SEQ ID NO: 42226 - DNA, 20 bp, Artificial Sequence
  Synthetic: FXN 3 reverse 9:69044541-69044564; SpCas9
tcactggttgccatggagag

SEQ ID NO: 42227 - DNA, 19 bp, Artificial Sequence
  Synthetic: FXN 3 reverse 9:69044542-69044564; SpCas9
cactggttgccatggagag

SEQ ID NO: 42228 - DNA, 18 bp, Artificial Sequence
  Synthetic: FXN 3 reverse 9:69044543-69044564; SpCas9
actggttgccatggagag

SEQ ID NO: 42229 - DNA, 25 bp, Artificial Sequence
  Synthetic: FXN 3 forward 9:69044538-69044566; SpCas9
tctctccatggcaaccagtgacctt

SEQ ID NO: 42230 - DNA, 24 bp, Artificial Sequence
  Synthetic: FXN 3 forward 9:69044539-69044566; SpCas9
ctctccatggcaaccagtgacctt

SEQ ID NO: 42231 - DNA, 23 bp, Artificial Sequence
  Synthetic: FXN 3 forward 9:69044540-69044566; SpCas9
tctccatggcaaccagtgacctt

SEQ ID NO: 42232 - DNA, 22 bp, Artificial Sequence
  Synthetic: FXN 3 forward 9:69044541-69044566; SpCas9
ctccatggcaaccagtgacctt

SEQ ID NO: 42233 - DNA, 21 bp, Artificial Sequence
  Synthetic: FXN 3 forward 9:69044542-69044566; SpCas9
tccatggcaaccagtgacctt

SEQ ID NO: 42234 - DNA, 20 bp, Artificial Sequence
  Synthetic: FXN 3 forward 9:69044543-69044566; SpCas9
ccatggcaaccagtgacctt

SEQ ID NO: 42235 - DNA, 19 bp, Artificial Sequence
  Synthetic: FXN 3 forward 9:69044544-69044566; SpCas9
catggcaaccagtgacctt

SEQ ID NO: 42236 - DNA, 18 bp, Artificial Sequence
  Synthetic: FXN 3 forward 9:69044545-69044566; SpCas9
atggcaaccagtgacctt

SEQ ID NO: 42237 - DNA, 25 bp, Artificial Sequence
  Synthetic: FXN 3 reverse 9:69044539-69044567; SpCas9
tccaaaggtcactggttgccatgga

SEQ ID NO: 42238 - DNA, 24 bp, Artificial Sequence
  Synthetic: FXN 3 reverse 9:69044540-69044567; SpCas9
ccaaaggtcactggttgccatgga

SEQ ID NO: 42239 - DNA, 23 bp, Artificial Sequence
  Synthetic: FXN 3 reverse 9:69044541-69044567; SpCas9
caaaggtcactggttgccatgga

SEQ ID NO: 42240 - DNA, 22 bp, Artificial Sequence
  Synthetic: FXN 3 reverse 9:69044542-69044567; SpCas9
aaaggtcactggttgccatgga

SEQ ID NO: 42241 - DNA, 21 bp, Artificial Sequence
  Synthetic: FXN 3 reverse 9:69044543-69044567; SpCas9
aaggtcactggttgccatgga

SEQ ID NO: 42242 - DNA, 20 bp, Artificial Sequence
  Synthetic: FXN 3 reverse 9:69044544-69044567; SpCas9
aggtcactggttgccatgga

SEQ ID NO: 42243 - DNA, 19 bp, Artificial Sequence
  Synthetic: FXN 3 reverse 9:69044545-69044567; SpCas9
ggtcactggttgccatgga

SEQ ID NO: 42244 - DNA, 18 bp, Artificial Sequence
  Synthetic: FXN 3 reverse 9:69044546-69044567; SpCas9
gtcactggttgccatgga

SEQ ID NO: 42245 - DNA, 25 bp, Artificial Sequence
  Synthetic: FXN 3 forward 9:69044540-69044568; SpCas9
tctccatggcaaccagtgacctttg

SEQ ID NO: 42246 - DNA, 24 bp, Artificial Sequence
  Synthetic: FXN 3 forward 9:69044541-69044568; SpCas9
ctccatggcaaccagtgacctttg

SEQ ID NO: 42247 - DNA, 23 bp, Artificial Sequence
  Synthetic: FXN 3 forward 9:69044542-69044568; SpCas9
tccatggcaaccagtgacctttg

SEQ ID NO: 42248 - DNA, 22 bp, Artificial Sequence
  Synthetic: FXN 3 forward 9:69044543-69044568; SpCas9
ccatggcaaccagtgacctttg

SEQ ID NO: 42249 - DNA, 21 bp, Artificial Sequence
  Synthetic: FXN 3 forward 9:69044544-69044568; SpCas9
catggcaaccagtgacctttg

SEQ ID NO: 42250 - DNA, 20 bp, Artificial Sequence
  Synthetic: FXN 3 forward 9:69044545-69044568; SpCas9
atggcaaccagtgacctttg

SEQ ID NO: 42251 - DNA, 19 bp, Artificial Sequence
  Synthetic: FXN 3 forward 9:69044546-69044568; SpCas9
tggcaaccagtgacctttg

SEQ ID NO: 42252 - DNA, 18 bp, Artificial Sequence
  Synthetic: FXN 3 forward 9:69044547-69044568; SpCas9
ggcaaccagtgacctttg

SEQ ID NO: 42253 - DNA, 25 bp, Artificial Sequence
  Synthetic: FXN 3 reverse 9:69044541-69044569; SpCas9
tctccaaaggtcactggttgccatg

SEQ ID NO: 42254 - DNA, 24 bp, Artificial Sequence
  Synthetic: FXN 3 reverse 9:69044542-69044569; SpCas9
ctccaaaggtcactggttgccatg

SEQ ID NO: 42255 - DNA, 23 bp, Artificial Sequence
  Synthetic: FXN 3 reverse 9:69044543-69044569; SpCas9
tccaaaggtcactggttgccatg

SEQ ID NO: 42256 - DNA, 22 bp, Artificial Sequence
  Synthetic: FXN 3 reverse 9:69044544-69044569; SpCas9
ccaaaggtcactggttgccatg

SEQ ID NO: 42257 - DNA, 21 bp, Artificial Sequence
  Synthetic: FXN 3 reverse 9:69044545-69044569; SpCas9
caaaggtcactggttgccatg

SEQ ID NO: 42258 - DNA, 20 bp, Artificial Sequence
  Synthetic: FXN 3 reverse 9:69044546-69044569; SpCas9
aaaggtcactggttgccatg

SEQ ID NO: 42259 - DNA, 19 bp, Artificial Sequence
  Synthetic: FXN 3 reverse 9:69044547-69044569; SpCas9
aaggtcactggttgccatg

SEQ ID NO: 42260 - DNA, 18 bp, Artificial Sequence
  Synthetic: FXN 3 reverse 9:69044548-69044569; SpCas9
aggtcactggttgccatg

SEQ ID NO: 42261 - DNA, 25 bp, Artificial Sequence
  Synthetic: FXN 3 reverse 9:69044543-69044571; SpCas9
attctccaaaggtcactggttgcca

SEQ ID NO: 42262 - DNA, 24 bp, Artificial Sequence
  Synthetic: FXN 3 reverse 9:69044544-69044571; SpCas9
ttctccaaaggtcactggttgcca

SEQ ID NO: 42263 - DNA, 23 bp, Artificial Sequence
  Synthetic: FXN 3 reverse 9:69044545-69044571; SpCas9
tctccaaaggtcactggttgcca

SEQ ID NO: 42264 - DNA, 22 bp, Artificial Sequence
  Synthetic: FXN 3 reverse 9:69044546-69044571; SpCas9
ctccaaaggtcactggttgcca

SEQ ID NO: 42265 - DNA, 21 bp, Artificial Sequence
  Synthetic: FXN 3 reverse 9:69044547-69044571; SpCas9
tccaaaggtcactggttgcca

SEQ ID NO: 42266 - DNA, 20 bp, Artificial Sequence
  Synthetic: FXN 3 reverse 9:69044548-69044571; SpCas9
ccaaaggtcactggttgcca

SEQ ID NO: 42267 - DNA, 19 bp, Artificial Sequence
  Synthetic: FXN 3 reverse 9:69044549-69044571; SpCas9
caaaggtcactggttgcca

SEQ ID NO: 42268 - DNA, 18 bp, Artificial Sequence
  Synthetic: FXN 3 reverse 9:69044550-69044571; SpCas9
aaaggtcactggttgcca

SEQ ID NO: 42269 - DNA, 25 bp, Artificial Sequence
  Synthetic: FXN 3 reverse 9:69044552-69044580; SpCas9
aaggtttacattctccaaaggtcac

SEQ ID NO: 42270 - DNA, 24 bp, Artificial Sequence
  Synthetic: FXN 3 reverse 9:69044553-69044580; SpCas9
aggtttacattctccaaaggtcac

SEQ ID NO: 42271 - DNA, 23 bp, Artificial Sequence
  Synthetic: FXN 3 reverse 9:69044554-69044580; SpCas9
ggtttacattctccaaaggtcac

SEQ ID NO: 42272 - DNA, 22 bp, Artificial Sequence
  Synthetic: FXN 3 reverse 9:69044555-69044580; SpCas9
gtttacattctccaaaggtcac

SEQ ID NO: 42273 - DNA, 21 bp, Artificial Sequence
  Synthetic: FXN 3 reverse 9:69044556-69044580; SpCas9
tttacattctccaaaggtcac

SEQ ID NO: 42274 - DNA, 20 bp, Artificial Sequence
  Synthetic: FXN 3 reverse 9:69044557-69044580; SpCas9
ttacattctccaaaggtcac

SEQ ID NO: 42275 - DNA, 19 bp, Artificial Sequence
  Synthetic: FXN 3 reverse 9:69044558-69044580; SpCas9
tacattctccaaaggtcac

SEQ ID NO: 42276 - DNA, 18 bp, Artificial Sequence
  Synthetic: FXN 3 reverse 9:69044559-69044580; SpCas9
acattctccaaaggtcac

SEQ ID NO: 42277 - DNA, 25 bp, Artificial Sequence
  Synthetic: FXN 3 reverse 9:69044559-69044587; SpCas9
tggtgataaggtttacattctccaa

SEQ ID NO: 42278 - DNA, 24 bp, Artificial Sequence
  Synthetic: FXN 3 reverse 9:69044560-69044587; SpCas9
ggtgataaggtttacattctccaa

SEQ ID NO: 42279 - DNA, 23 bp, Artificial Sequence
  Synthetic: FXN 3 reverse 9:69044561-69044587; SpCas9
gtgataaggtttacattctccaa

SEQ ID NO: 42280 - DNA, 22 bp, Artificial Sequence
  Synthetic: FXN 3 reverse 9:69044562-69044587; SpCas9
tgataaggtttacattctccaa

SEQ ID NO: 42281 - DNA, 21 bp, Artificial Sequence
  Synthetic: FXN 3 reverse 9:69044563-69044587; SpCas9
gataaggtttacattctccaa

SEQ ID NO: 42282 - DNA, 20 bp, Artificial Sequence
  Synthetic: FXN 3 reverse 9:69044564-69044587; SpCas9
ataaggtttacattctccaa

SEQ ID NO: 42283 - DNA, 19 bp, Artificial Sequence
  Synthetic: FXN 3 reverse 9:69044565-69044587; SpCas9
taaggtttacattctccaa

SEQ ID NO: 42284 - DNA, 18 bp, Artificial Sequence
  Synthetic: FXN 3 reverse 9:69044566-69044587; SpCas9
aaggtttacattctccaa

SEQ ID NO: 42285 - DNA, 25 bp, Artificial Sequence
  Synthetic: FXN 3 reverse 9:69044560-69044588; SpCas9
ttggtgataaggtttacattctcca

SEQ ID NO: 42286 - DNA, 24 bp, Artificial Sequence
  Synthetic: FXN 3 reverse 9:69044561-69044588; SpCas9
tggtgataaggtttacattctcca

SEQ ID NO: 42287 - DNA, 23 bp, Artificial Sequence
  Synthetic: FXN 3 reverse 9:69044562-69044588; SpCas9
ggtgataaggtttacattctcca

SEQ ID NO: 42288 - DNA, 22 bp, Artificial Sequence
  Synthetic: FXN 3 reverse 9:69044563-69044588; SpCas9
gtgataaggtttacattctcca

SEQ ID NO: 42289 - DNA, 21 bp, Artificial Sequence
  Synthetic: FXN 3 reverse 9:69044564-69044588; SpCas9
tgataaggtttacattctcca

SEQ ID NO: 42290 - DNA, 20 bp, Artificial Sequence
  Synthetic: FXN 3 reverse 9:69044565-69044588; SpCas9
gataaggtttacattctcca

SEQ ID NO: 42291 - DNA, 19 bp, Artificial Sequence
  Synthetic: FXN 3 reverse 9:69044566-69044588; SpCas9
ataaggtttacattctcca

SEQ ID NO: 42292 - DNA, 18 bp, Artificial Sequence
  Synthetic: FXN 3 reverse 9:69044567-69044588; SpCas9
taaggtttacattctcca

SEQ ID NO: 42293 - DNA, 25 bp, Artificial Sequence
  Synthetic: FXN 3 forward 9:69044570-69044598; SpCas9
tgtaaaccttatcaccaatctctta

SEQ ID NO: 42294 - DNA, 24 bp, Artificial Sequence
  Synthetic: FXN 3 forward 9:69044571-69044598; SpCas9
gtaaaccttatcaccaatctctta

SEQ ID NO: 42295 - DNA, 23 bp, Artificial Sequence
  Synthetic: FXN 3 forward 9:69044572-69044598; SpCas9
taaaccttatcaccaatctctta

SEQ ID NO: 42296 - DNA, 22 bp, Artificial Sequence
  Synthetic: FXN 3 forward 9:69044573-69044598; SpCas9
aaaccttatcaccaatctctta

SEQ ID NO: 42297 - DNA, 21 bp, Artificial Sequence
  Synthetic: FXN 3 forward 9:69044574-69044598; SpCas9
aaccttatcaccaatctctta

SEQ ID NO: 42298 - DNA, 20 bp, Artificial Sequence
  Synthetic: FXN 3 forward 9:69044575-69044598; SpCas9
accttatcaccaatctctta

SEQ ID NO: 42299 - DNA, 19 bp, Artificial Sequence
  Synthetic: FXN 3 forward 9:69044576-69044598; SpCas9
ccttatcaccaatctctta

SEQ ID NO: 42300 - DNA, 18 bp, Artificial Sequence
  Synthetic: FXN 3 forward 9:69044577-69044598; SpCas9
cttatcaccaatctctta

SEQ ID NO: 42301 - DNA, 25 bp, Artificial Sequence
  Synthetic: FXN 3 reverse 9:69044576-69044604; SpCas9
gaagggctttaagagattggtgata

SEQ ID NO: 42302 - DNA, 24 bp, Artificial Sequence
  Synthetic: FXN 3 reverse 9:69044577-69044604; SpCas9
aagggctttaagagattggtgata

SEQ ID NO: 42303 - DNA, 23 bp, Artificial Sequence
  Synthetic: FXN 3 reverse 9:69044578-69044604; SpCas9
agggctttaagagattggtgata

SEQ ID NO: 42304 - DNA, 22 bp, Artificial Sequence
  Synthetic: FXN 3 reverse 9:69044579-69044604; SpCas9
gggctttaagagattggtgata

SEQ ID NO: 42305 - DNA, 21 bp, Artificial Sequence
  Synthetic: FXN 3 reverse 9:69044580-69044604; SpCas9
ggctttaagagattggtgata

SEQ ID NO: 42306 - DNA, 20 bp, Artificial Sequence
  Synthetic: FXN 3 reverse 9:69044581-69044604; SpCas9
gctttaagagattggtgata

SEQ ID NO: 42307 - DNA, 19 bp, Artificial Sequence
  Synthetic: FXN 3 reverse 9:69044582-69044604; SpCas9
ctttaagagattggtgata

SEQ ID NO: 42308 - DNA, 18 bp, Artificial Sequence
  Synthetic: FXN 3 reverse 9:69044583-69044604; SpCas9
tttaagagattggtgata

SEQ ID NO: 42309 - DNA, 25 bp, Artificial Sequence
  Synthetic: FXN 3 reverse 9:69044577-69044605; SpCas9
cgaagggctttaagagattggtgat

SEQ ID NO: 42310 - DNA, 24 bp, Artificial Sequence
  Synthetic: FXN 3 reverse 9:69044578-69044605; SpCas9
gaagggctttaagagattggtgat

SEQ ID NO: 42311 - DNA, 23 bp, Artificial Sequence
  Synthetic: FXN 3 reverse 9:69044579-69044605; SpCas9
aagggctttaagagattggtgat

SEQ ID NO: 42312 - DNA, 22 bp, Artificial Sequence
  Synthetic: FXN 3 reverse 9:69044580-69044605; SpCas9
agggctttaagagattggtgat

SEQ ID NO: 42313 - DNA, 21 bp, Artificial Sequence
  Synthetic: FXN 3 reverse 9:69044581-69044605; SpCas9
gggctttaagagattggtgat

SEQ ID NO: 42314 - DNA, 20 bp, Artificial Sequence
  Synthetic: FXN 3 reverse 9:69044582-69044605; SpCas9
ggctttaagagattggtgat

SEQ ID NO: 42315 - DNA, 19 bp, Artificial Sequence
  Synthetic: FXN 3 reverse 9:69044583-69044605; SpCas9
gctttaagagattggtgat

SEQ ID NO: 42316 - DNA, 18 bp, Artificial Sequence
  Synthetic: FXN 3 reverse 9:69044584-69044605; SpCas9
ctttaagagattggtgat

SEQ ID NO: 42317 - DNA, 25 bp, Artificial Sequence
  Synthetic: FXN 3 forward 9:69044578-69044606; SpCas9
ttatcaccaatctcttaaagccctt

SEQ ID NO: 42318 - DNA, 24 bp, Artificial Sequence
  Synthetic: FXN 3 forward 9:69044579-69044606; SpCas9
tatcaccaatctcttaaagccctt

SEQ ID NO: 42319 - DNA, 23 bp, Artificial Sequence
  Synthetic: FXN 3 forward 9:69044580-69044606; SpCas9
atcaccaatctcttaaagccctt

SEQ ID NO: 42320 - DNA, 22 bp, Artificial Sequence
  Synthetic: FXN 3 forward 9:69044581-69044606; SpCas9
tcaccaatctcttaaagccctt

SEQ ID NO: 42321 - DNA, 21 bp, Artificial Sequence
  Synthetic: FXN 3 forward 9:69044582-69044606; SpCas9
caccaatctcttaaagccctt

SEQ ID NO: 42322 - DNA, 20 bp, Artificial Sequence
  Synthetic: FXN 3 forward 9:69044583-69044606; SpCas9
accaatctcttaaagccctt

SEQ ID NO: 42323 - DNA, 19 bp, Artificial Sequence
  Synthetic: FXN 3 forward 9:69044584-69044606; SpCas9
ccaatctcttaaagccctt

SEQ ID NO: 42324 - DNA, 18 bp, Artificial Sequence
  Synthetic: FXN 3 forward 9:69044585-69044606; SpCas9
caatctcttaaagccctt

SEQ ID NO: 42325 - DNA, 25 bp, Artificial Sequence
  Synthetic: FXN 3 reverse 9:69044584-69044612; SpCas9
aaggcaccgaagggctttaagagat

SEQ ID NO: 42326 - DNA, 24 bp, Artificial Sequence
  Synthetic: FXN 3 reverse 9:69044585-69044612; SpCas9
aggcaccgaagggctttaagagat

SEQ ID NO: 42327 - DNA, 23 bp, Artificial Sequence
  Synthetic: FXN 3 reverse 9:69044586-69044612; SpCas9
ggcaccgaagggctttaagagat

SEQ ID NO: 42328 - DNA, 22 bp, Artificial Sequence
  Synthetic: FXN 3 reverse 9:69044587-69044612; SpCas9
gcaccgaagggctttaagagat

SEQ ID NO: 42329 - DNA, 21 bp, Artificial Sequence
  Synthetic: FXN 3 reverse 9:69044588-69044612; SpCas9
caccgaagggctttaagagat

SEQ ID NO: 42330 - DNA, 20 bp, Artificial Sequence
  Synthetic: FXN 3 reverse 9:69044589-69044612; SpCas9
accgaagggctttaagagat

SEQ ID NO: 42331 - DNA, 19 bp, Artificial Sequence
  Synthetic: FXN 3 reverse 9:69044590-69044612; SpCas9
ccgaagggctttaagagat

SEQ ID NO: 42332 - DNA, 18 bp, Artificial Sequence
  Synthetic: FXN 3 reverse 9:69044591-69044612; SpCas9
cgaagggctttaagagat

SEQ ID NO: 42333 - DNA, 25 bp, Artificial Sequence
  Synthetic: FXN 3 forward 9:69044589-69044617; SpCas9
ctcttaaagcccttcggtgccttcc

SEQ ID NO: 42334 - DNA, 24 bp, Artificial Sequence
  Synthetic: FXN 3 forward 9:69044590-69044617; SpCas9
tcttaaagcccttcggtgccttcc

SEQ ID NO: 42335 - DNA, 23 bp, Artificial Sequence
  Synthetic: FXN 3 forward 9:69044591-69044617; SpCas9
cttaaagcccttcggtgccttcc

SEQ ID NO: 42336 - DNA, 22 bp, Artificial Sequence
  Synthetic: FXN 3 forward 9:69044592-69044617; SpCas9
ttaaagcccttcggtgccttcc

SEQ ID NO: 42337 - DNA, 21 bp, Artificial Sequence
  Synthetic: FXN 3 forward 9:69044593-69044617; SpCas9
taaagcccttcggtgccttcc

SEQ ID NO: 42338 - DNA, 20 bp, Artificial Sequence
  Synthetic: FXN 3 forward 9:69044594-69044617; SpCas9
aaagcccttcggtgccttcc

SEQ ID NO: 42339 - DNA, 19 bp, Artificial Sequence
  Synthetic: FXN 3 forward 9:69044595-69044617; SpCas9
aagcccttcggtgccttcc

SEQ ID NO: 42340 - DNA, 18 bp, Artificial Sequence
  Synthetic: FXN 3 forward 9:69044596-69044617; SpCas9
agcccttcggtgccttcc

SEQ ID NO: 42341 - DNA, 25 bp, Artificial Sequence
  Synthetic: FXN 3 reverse 9:69044589-69044617; SpCas9
ctgggaaggcaccgaagggctttaa

SEQ ID NO: 42342 - DNA, 24 bp, Artificial Sequence
  Synthetic: FXN 3 reverse 9:69044590-69044617; SpCas9
tgggaaggcaccgaagggctttaa

SEQ ID NO: 42343 - DNA, 23 bp, Artificial Sequence
  Synthetic: FXN 3 reverse 9:69044591-69044617; SpCas9
gggaaggcaccgaagggctttaa

SEQ ID NO: 42344 - DNA, 22 bp, Artificial Sequence
  Synthetic: FXN 3 reverse 9:69044592-69044617; SpCas9
ggaaggcaccgaagggctttaa

SEQ ID NO: 42345 - DNA, 21 bp, Artificial Sequence
  Synthetic: FXN 3 reverse 9:69044593-69044617; SpCas9
gaaggcaccgaagggctttaa

SEQ ID NO: 42346 - DNA, 20 bp, Artificial Sequence
  Synthetic: FXN 3 reverse 9:69044594-69044617; SpCas9
aaggcaccgaagggctttaa

SEQ ID NO: 42347 - DNA, 19 bp, Artificial Sequence
  Synthetic: FXN 3 reverse 9:69044595-69044617; SpCas9
aggcaccgaagggctttaa

SEQ ID NO: 42348 - DNA, 18 bp, Artificial Sequence
  Synthetic: FXN 3 reverse 9:69044596-69044617; SpCas9
ggcaccgaagggctttaa

SEQ ID NO: 42349 - DNA, 25 bp, Artificial Sequence
  Synthetic: FXN 3 forward 9:69044590-69044618; SpCas9
tcttaaagcccttcggtgccttccc

SEQ ID NO: 42350 - DNA, 24 bp, Artificial Sequence
  Synthetic: FXN 3 forward 9:69044591-69044618; SpCas9
cttaaagcccttcggtgccttccc

SEQ ID NO: 42351 - DNA, 23 bp, Artificial Sequence
  Synthetic: FXN 3 forward 9:69044592-69044618; SpCas9
ttaaagcccttcggtgccttccc

SEQ ID NO: 42352 - DNA, 22 bp, Artificial Sequence
  Synthetic: FXN 3 forward 9:69044593-69044618; SpCas9
taaagcccttcggtgccttccc

SEQ ID NO: 42353 - DNA, 21 bp, Artificial Sequence
  Synthetic: FXN 3 forward 9:69044594-69044618; SpCas9
aaagcccttcggtgccttccc

SEQ ID NO: 42354 - DNA, 20 bp, Artificial Sequence
  Synthetic: FXN 3 forward 9:69044595-69044618; SpCas9
aagcccttcggtgccttccc

SEQ ID NO: 42355 - DNA, 19 bp, Artificial Sequence
  Synthetic: FXN 3 forward 9:69044596-69044618; SpCas9
agcccttcggtgccttccc

SEQ ID NO: 42356 - DNA, 18 bp, Artificial Sequence
  Synthetic: FXN 3 forward 9:69044597-69044618; SpCas9
gcccttcggtgccttccc

SEQ ID NO: 42357 - DNA, 25 bp, Artificial Sequence
  Synthetic: FXN 3 reverse 9:69044591-69044619; SpCas9
tcctgggaaggcaccgaagggcttt

SEQ ID NO: 42358 - DNA, 24 bp, Artificial Sequence
  Synthetic: FXN 3 reverse 9:69044592-69044619; SpCas9
cctgggaaggcaccgaagggcttt

SEQ ID NO: 42359 - DNA, 23 bp, Artificial Sequence
  Synthetic: FXN 3 reverse 9:69044593-69044619; SpCas9
ctgggaaggcaccgaagggcttt

SEQ ID NO: 42360 - DNA, 22 bp, Artificial Sequence
  Synthetic: FXN 3 reverse 9:69044594-69044619; SpCas9
tgggaaggcaccgaagggcttt

SEQ ID NO: 42361 - DNA, 21 bp, Artificial Sequence
  Synthetic: FXN 3 reverse 9:69044595-69044619; SpCas9
gggaaggcaccgaagggcttt

SEQ ID NO: 42362 - DNA, 20 bp, Artificial Sequence
  Synthetic: FXN 3 reverse 9:69044596-69044619; SpCas9
ggaaggcaccgaagggcttt

SEQ ID NO: 42363 - DNA, 19 bp, Artificial Sequence
  Synthetic: FXN 3 reverse 9:69044597-69044619; SpCas9
gaaggcaccgaagggcttt

SEQ ID NO: 42364 - DNA, 18 bp, Artificial Sequence
  Synthetic: FXN 3 reverse 9:69044598-69044619; SpCas9
aaggcaccgaagggcttt

SEQ ID NO: 42365 - DNA, 25 bp, Artificial Sequence
  Synthetic: FXN 3 reverse 9:69044598-69044626; SpCas9
gacgtcatcctgggaaggcaccgaa

SEQ ID NO: 42366 - DNA, 24 bp, Artificial Sequence
  Synthetic: FXN 3 reverse 9:69044599-69044626; SpCas9
acgtcatcctgggaaggcaccgaa

SEQ ID NO: 42367 - DNA, 23 bp, Artificial Sequence
  Synthetic: FXN 3 reverse 9:69044600-69044626; SpCas9
cgtcatcctgggaaggcaccgaa

SEQ ID NO: 42368 - DNA, 22 bp, Artificial Sequence
  Synthetic: FXN 3 reverse 9:69044601-69044626; SpCas9
gtcatcctgggaaggcaccgaa

SEQ ID NO: 42369 - DNA, 21 bp, Artificial Sequence
  Synthetic: FXN 3 reverse 9:69044602-69044626; SpCas9
tcatcctgggaaggcaccgaa

SEQ ID NO: 42370 - DNA, 20 bp, Artificial Sequence
  Synthetic: FXN 3 reverse 9:69044603-69044626; SpCas9
catcctgggaaggcaccgaa

SEQ ID NO: 42371 - DNA, 19 bp, Artificial Sequence
  Synthetic: FXN 3 reverse 9:69044604-69044626; SpCas9
atcctgggaaggcaccgaa

SEQ ID NO: 42372 - DNA, 18 bp, Artificial Sequence
  Synthetic: FXN 3 reverse 9:69044605-69044626; SpCas9
tcctgggaaggcaccgaa

SEQ ID NO: 42373 - DNA, 25 bp, Artificial Sequence
  Synthetic: FXN 3 reverse 9:69044599-69044627; SpCas9
ggacgtcatcctgggaaggcaccga

SEQ ID NO: 42374 - DNA, 24 bp, Artificial Sequence
  Synthetic: FXN 3 reverse 9:69044600-69044627; SpCas9
gacgtcatcctgggaaggcaccga

SEQ ID NO: 42375 - DNA, 23 bp, Artificial Sequence
  Synthetic: FXN 3 reverse 9:69044601-69044627; SpCas9
acgtcatcctgggaaggcaccga

SEQ ID NO: 42376 - DNA, 22 bp, Artificial Sequence
  Synthetic: FXN 3 reverse 9:69044602-69044627; SpCas9
cgtcatcctgggaaggcaccga

SEQ ID NO: 42377 - DNA, 21 bp, Artificial Sequence
  Synthetic: FXN 3 reverse 9:69044603-69044627; SpCas9
gtcatcctgggaaggcaccga

SEQ ID NO: 42378 - DNA, 20 bp, Artificial Sequence
  Synthetic: FXN 3 reverse 9:69044604-69044627; SpCas9
tcatcctgggaaggcaccga

SEQ ID NO: 42379 - DNA, 19 bp, Artificial Sequence
  Synthetic: FXN 3 reverse 9:69044605-69044627; SpCas9
catcctgggaaggcaccga

SEQ ID NO: 42380 - DNA, 18 bp, Artificial Sequence
  Synthetic: FXN 3 reverse 9:69044606-69044627; SpCas9
atcctgggaaggcaccga

SEQ ID NO: 42381 - DNA, 25 bp, Artificial Sequence
  Synthetic: FXN 3 reverse 9:69044600-69044628; SpCas9
tggacgtcatcctgggaaggcaccg

SEQ ID NO: 42382 - DNA, 24 bp, Artificial Sequence
  Synthetic: FXN 3 reverse 9:69044601-69044628; SpCas9
ggacgtcatcctgggaaggcaccg

SEQ ID NO: 42383 - DNA, 23 bp, Artificial Sequence
  Synthetic: FXN 3 reverse 9:69044602-69044628; SpCas9
gacgtcatcctgggaaggcaccg

SEQ ID NO: 42384 - DNA, 22 bp, Artificial Sequence
  Synthetic: FXN 3 reverse 9:69044603-69044628; SpCas9
acgtcatcctgggaaggcaccg

SEQ ID NO: 42385 - DNA, 21 bp, Artificial Sequence
  Synthetic: FXN 3 reverse 9:69044604-69044628; SpCas9
cgtcatcctgggaaggcaccg

SEQ ID NO: 42386 - DNA, 20 bp, Artificial Sequence
  Synthetic: FXN 3 reverse 9:69044605-69044628; SpCas9
gtcatcctgggaaggcaccg

SEQ ID NO: 42387 - DNA, 19 bp, Artificial Sequence
  Synthetic: FXN 3 reverse 9:69044606-69044628; SpCas9
tcatcctgggaaggcaccg

SEQ ID NO: 42388 - DNA, 18 bp, Artificial Sequence
  Synthetic: FXN 3 reverse 9:69044607-69044628; SpCas9
catcctgggaaggcaccg

SEQ ID NO: 42389 - DNA, 25 bp, Artificial Sequence
  Synthetic: FXN 3 forward 9:69044601-69044629; SpCas9
ttcggtgccttcccaggatgacgtc

SEQ ID NO: 42390 - DNA, 24 bp, Artificial Sequence
  Synthetic: FXN 3 forward 9:69044602-69044629; SpCas9
tcggtgccttcccaggatgacgtc

SEQ ID NO: 42391 - DNA, 23 bp, Artificial Sequence
  Synthetic: FXN 3 forward 9:69044603-69044629; SpCas9
cggtgccttcccaggatgacgtc

SEQ ID NO: 42392 - DNA, 22 bp, Artificial Sequence
  Synthetic: FXN 3 forward 9:69044604-69044629; SpCas9
ggtgccttcccaggatgacgtc

SEQ ID NO: 42393 - DNA, 21 bp, Artificial Sequence
  Synthetic: FXN 3 forward 9:69044605-69044629; SpCas9
gtgccttcccaggatgacgtc

SEQ ID NO: 42394 - DNA, 20 bp, Artificial Sequence
  Synthetic: FXN 3 forward 9:69044606-69044629; SpCas9
tgccttcccaggatgacgtc

SEQ ID NO: 42395 - DNA, 19 bp, Artificial Sequence
  Synthetic: FXN 3 forward 9:69044607-69044629; SpCas9
gccttcccaggatgacgtc

SEQ ID NO: 42396 - DNA, 18 bp, Artificial Sequence
  Synthetic: FXN 3 forward 9:69044608-69044629; SpCas9
ccttcccaggatgacgtc

SEQ ID NO: 42397 - DNA, 25 bp, Artificial Sequence
  Synthetic: FXN 3 forward 9:69044606-69044634; SpCas9
tgccttcccaggatgacgtccagct

SEQ ID NO: 42398 - DNA, 24 bp, Artificial Sequence
  Synthetic: FXN 3 forward 9:69044607-69044634; SpCas9
gccttcccaggatgacgtccagct

SEQ ID NO: 42399 - DNA, 23 bp, Artificial Sequence
  Synthetic: FXN 3 forward 9:69044608-69044634; SpCas9
ccttcccaggatgacgtccagct

SEQ ID NO: 42400 - DNA, 22 bp, Artificial Sequence
  Synthetic: FXN 3 forward 9:69044609-69044634; SpCas9
cttcccaggatgacgtccagct

SEQ ID NO: 42401 - DNA, 21 bp, Artificial Sequence
  Synthetic: FXN 3 forward 9:69044610-69044634; SpCas9
ttcccaggatgacgtccagct

SEQ ID NO: 42402 - DNA, 20 bp, Artificial Sequence
  Synthetic: FXN 3 forward 9:69044611-69044634; SpCas9
tcccaggatgacgtccagct

SEQ ID NO: 42403 - DNA, 19 bp, Artificial Sequence
  Synthetic: FXN 3 forward 9:69044612-69044634; SpCas9
cccaggatgacgtccagct

SEQ ID NO: 42404 - DNA, 18 bp, Artificial Sequence
  Synthetic: FXN 3 forward 9:69044613-69044634; SpCas9
ccaggatgacgtccagct

SEQ ID NO: 42405 - DNA, 25 bp, Artificial Sequence
  Synthetic: FXN 3 forward 9:69044607-69044635; SpCas9
gccttcccaggatgacgtccagctg

SEQ ID NO: 42406 - DNA, 24 bp, Artificial Sequence
  Synthetic: FXN 3 forward 9:69044608-69044635; SpCas9
ccttcccaggatgacgtccagctg

SEQ ID NO: 42407 - DNA, 23 bp, Artificial Sequence
  Synthetic: FXN 3 forward 9:69044609-69044635; SpCas9
cttcccaggatgacgtccagctg

SEQ ID NO: 42408 - DNA, 22 bp, Artificial Sequence
  Synthetic: FXN 3 forward 9:69044610-69044635; SpCas9
ttcccaggatgacgtccagctg

SEQ ID NO: 42409 - DNA, 21 bp, Artificial Sequence
  Synthetic: FXN 3 forward 9:69044611-69044635; SpCas9
tcccaggatgacgtccagctg

SEQ ID NO: 42410 - DNA, 20 bp, Artificial Sequence
  Synthetic: FXN 3 forward 9:69044612-69044635; SpCas9
cccaggatgacgtccagctg

SEQ ID NO: 42411 - DNA, 19 bp, Artificial Sequence
  Synthetic: FXN 3 forward 9:69044613-69044635; SpCas9
ccaggatgacgtccagctg

SEQ ID NO: 42412 - DNA, 18 bp, Artificial Sequence
  Synthetic: FXN 3 forward 9:69044614-69044635; SpCas9
caggatgacgtccagctg

SEQ ID NO: 42413 - DNA, 25 bp, Artificial Sequence
  Synthetic: FXN 3 reverse 9:69044608-69044636; SpCas9
acctcagctggacgtcatcctggga

SEQ ID NO: 42414 - DNA, 24 bp, Artificial Sequence
  Synthetic: FXN 3 reverse 9:69044609-69044636; SpCas9
cctcagctggacgtcatcctggga

SEQ ID NO: 42415 - DNA, 23 bp, Artificial Sequence
  Synthetic: FXN 3 reverse 9:69044610-69044636; SpCas9
ctcagctggacgtcatcctggga

SEQ ID NO: 42416 - DNA, 22 bp, Artificial Sequence
  Synthetic: FXN 3 reverse 9:69044611-69044636; SpCas9
tcagctggacgtcatcctggga

SEQ ID NO: 42417 - DNA, 21 bp, Artificial Sequence
  Synthetic: FXN 3 reverse 9:69044612-69044636; SpCas9
cagctggacgtcatcctggga

SEQ ID NO: 42418 - DNA, 20 bp, Artificial Sequence
  Synthetic: FXN 3 reverse 9:69044613-69044636; SpCas9
agctggacgtcatcctggga

SEQ ID NO: 42419 - DNA, 19 bp, Artificial Sequence
  Synthetic: FXN 3 reverse 9:69044614-69044636; SpCas9
gctggacgtcatcctggga

SEQ ID NO: 42420 - DNA, 18 bp, Artificial Sequence
  Synthetic: FXN 3 reverse 9:69044615-69044636; SpCas9
ctggacgtcatcctggga

SEQ ID NO: 42421 - DNA, 25 bp, Artificial Sequence
  Synthetic: FXN 3 reverse 9:69044609-69044637; SpCas9
gacctcagctggacgtcatcctggg

SEQ ID NO: 42422 - DNA, 24 bp, Artificial Sequence
  Synthetic: FXN 3 reverse 9:69044610-69044637; SpCas9
acctcagctggacgtcatcctggg

SEQ ID NO: 42423 - DNA, 23 bp, Artificial Sequence
  Synthetic: FXN 3 reverse 9:69044611-69044637; SpCas9
cctcagctggacgtcatcctggg

SEQ ID NO: 42424 - DNA, 22 bp, Artificial Sequence
  Synthetic: FXN 3 reverse 9:69044612-69044637; SpCas9
ctcagctggacgtcatcctggg

SEQ ID NO: 42425 - DNA, 21 bp, Artificial Sequence
  Synthetic: FXN 3 reverse 9:69044613-69044637; SpCas9
tcagctggacgtcatcctggg

SEQ ID NO: 42426 - DNA, 20 bp, Artificial Sequence
  Synthetic: FXN 3 reverse 9:69044614-69044637; SpCas9
cagctggacgtcatcctggg

SEQ ID NO: 42427 - DNA, 19 bp, Artificial Sequence
  Synthetic: FXN 3 reverse 9:69044615-69044637; SpCas9
agctggacgtcatcctggg

SEQ ID NO: 42428 - DNA, 18 bp, Artificial Sequence
  Synthetic: FXN 3 reverse 9:69044616-69044637; SpCas9
gctggacgtcatcctggg

SEQ ID NO: 42429 - DNA, 25 bp, Artificial Sequence
  Synthetic: FXN 3 reverse 9:69044612-69044640; SpCas9
aaggacctcagctggacgtcatcct

SEQ ID NO: 42430 - DNA, 24 bp, Artificial Sequence
  Synthetic: FXN 3 reverse 9:69044613-69044640; SpCas9
aggacctcagctggacgtcatcct

SEQ ID NO: 42431 - DNA, 23 bp, Artificial Sequence
  Synthetic: FXN 3 reverse 9:69044614-69044640; SpCas9
ggacctcagctggacgtcatcct

SEQ ID NO: 42432 - DNA, 22 bp, Artificial Sequence
  Synthetic: FXN 3 reverse 9:69044615-69044640; SpCas9
gacctcagctggacgtcatcct

SEQ ID NO: 42433 - DNA, 21 bp, Artificial Sequence
  Synthetic: FXN 3 reverse 9:69044616-69044640; SpCas9
acctcagctggacgtcatcct

SEQ ID NO: 42434 - DNA, 20 bp, Artificial Sequence
  Synthetic: FXN 3 reverse 9:69044617-69044640; SpCas9
cctcagctggacgtcatcct

SEQ ID NO: 42435 - DNA, 19 bp, Artificial Sequence
  Synthetic: FXN 3 reverse 9:69044618-69044640; SpCas9
ctcagctggacgtcatcct

SEQ ID NO: 42436 - DNA, 18 bp, Artificial Sequence
  Synthetic: FXN 3 reverse 9:69044619-69044640; SpCas9
tcagctggacgtcatcct

SEQ ID NO: 42437 - DNA, 25 bp, Artificial Sequence
  Synthetic: FXN 3 reverse 9:69044613-69044641; SpCas9
caaggacctcagctggacgtcatcc

SEQ ID NO: 42438 - DNA, 24 bp, Artificial Sequence
  Synthetic: FXN 3 reverse 9:69044614-69044641; SpCas9
aaggacctcagctggacgtcatcc

SEQ ID NO: 42439 - DNA, 23 bp, Artificial Sequence
  Synthetic: FXN 3 reverse 9:69044615-69044641; SpCas9
aggacctcagctggacgtcatcc

SEQ ID NO: 42440 - DNA, 22 bp, Artificial Sequence
  Synthetic: FXN 3 reverse 9:69044616-69044641; SpCas9
ggacctcagctggacgtcatcc

SEQ ID NO: 42441 - DNA, 21 bp, Artificial Sequence
  Synthetic: FXN 3 reverse 9:69044617-69044641; SpCas9
gacctcagctggacgtcatcc

SEQ ID NO: 42442 - DNA, 20 bp, Artificial Sequence
  Synthetic: FXN 3 reverse 9:69044618-69044641; SpCas9
acctcagctggacgtcatcc

SEQ ID NO: 42443 - DNA, 19 bp, Artificial Sequence
  Synthetic: FXN 3 reverse 9:69044619-69044641; SpCas9
cctcagctggacgtcatcc

SEQ ID NO: 42444 - DNA, 18 bp, Artificial Sequence
  Synthetic: FXN 3 reverse 9:69044620-69044641; SpCas9
ctcagctggacgtcatcc

SEQ ID NO: 42445 - DNA, 25 bp, Artificial Sequence
  Synthetic: FXN 3 forward 9:69044614-69044642; SpCas9
caggatgacgtccagctgaggtcct

SEQ ID NO: 42446 - DNA, 24 bp, Artificial Sequence
  Synthetic: FXN 3 forward 9:69044615-69044642; SpCas9
aggatgacgtccagctgaggtcct

SEQ ID NO: 42447 - DNA, 23 bp, Artificial Sequence
  Synthetic: FXN 3 forward 9:69044616-69044642; SpCas9
ggatgacgtccagctgaggtcct

SEQ ID NO: 42448 - DNA, 22 bp, Artificial Sequence
  Synthetic: FXN 3 forward 9:69044617-69044642; SpCas9
gatgacgtccagctgaggtcct

SEQ ID NO: 42449 - DNA, 21 bp, Artificial Sequence
  Synthetic: FXN 3 forward 9:69044618-69044642; SpCas9
atgacgtccagctgaggtcct

SEQ ID NO: 42450 - DNA, 20 bp, Artificial Sequence
  Synthetic: FXN 3 forward 9:69044619-69044642; SpCas9
tgacgtccagctgaggtcct

SEQ ID NO: 42451 - DNA, 19 bp, Artificial Sequence
  Synthetic: FXN 3 forward 9:69044620-69044642; SpCas9
gacgtccagctgaggtcct

SEQ ID NO: 42452 - DNA, 18 bp, Artificial Sequence
  Synthetic: FXN 3 forward 9:69044621-69044642; SpCas9
acgtccagctgaggtcct

SEQ ID NO: 42453 - DNA, 25 bp, Artificial Sequence
  Synthetic: FXN 3 forward 9:69044618-69044646; SpCas9
atgacgtccagctgaggtccttggc

SEQ ID NO: 42454 - DNA, 24 bp, Artificial Sequence
  Synthetic: FXN 3 forward 9:69044619-69044646; SpCas9
tgacgtccagctgaggtccttggc

SEQ ID NO: 42455 - DNA, 23 bp, Artificial Sequence
  Synthetic: FXN 3 forward 9:69044620-69044646; SpCas9
gacgtccagctgaggtccttggc

SEQ ID NO: 42456 - DNA, 22 bp, Artificial Sequence
  Synthetic: FXN 3 forward 9:69044621-69044646; SpCas9
acgtccagctgaggtccttggc

SEQ ID NO: 42457 - DNA, 21 bp, Artificial Sequence
  Synthetic: FXN 3 forward 9:69044622-69044646; SpCas9
cgtccagctgaggtccttggc

SEQ ID NO: 42458 - DNA, 20 bp, Artificial Sequence
  Synthetic: FXN 3 forward 9:69044623-69044646; SpCas9
gtccagctgaggtccttggc

SEQ ID NO: 42459 - DNA, 19 bp, Artificial Sequence
  Synthetic: FXN 3 forward 9:69044624-69044646; SpCas9
tccagctgaggtccttggc

SEQ ID NO: 42460 - DNA, 18 bp, Artificial Sequence
  Synthetic: FXN 3 forward 9:69044625-69044646; SpCas9
ccagctgaggtccttggc

SEQ ID NO: 42461 - DNA, 25 bp, Artificial Sequence
  Synthetic: FXN 3 forward 9:69044624-69044652; SpCas9
tccagctgaggtccttggcaagacc

SEQ ID NO: 42462 - DNA, 24 bp, Artificial Sequence
  Synthetic: FXN 3 forward 9:69044625-69044652; SpCas9
ccagctgaggtccttggcaagacc

SEQ ID NO: 42463 - DNA, 23 bp, Artificial Sequence
  Synthetic: FXN 3 forward 9:69044626-69044652; SpCas9
cagctgaggtccttggcaagacc

SEQ ID NO: 42464 - DNA, 22 bp, Artificial Sequence
  Synthetic: FXN 3 forward 9:69044627-69044652; SpCas9
agctgaggtccttggcaagacc

SEQ ID NO: 42465 - DNA, 21 bp, Artificial Sequence
  Synthetic: FXN 3 forward 9:69044628-69044652; SpCas9
gctgaggtccttggcaagacc

SEQ ID NO: 42466 - DNA, 20 bp, Artificial Sequence
  Synthetic: FXN 3 forward 9:69044629-69044652; SpCas9
ctgaggtccttggcaagacc

SEQ ID NO: 42467 - DNA, 19 bp, Artificial Sequence
  Synthetic: FXN 3 forward 9:69044630-69044652; SpCas9
tgaggtccttggcaagacc

SEQ ID NO: 42468 - DNA, 18 bp, Artificial Sequence
  Synthetic: FXN 3 forward 9:69044631-69044652; SpCas9
gaggtccttggcaagacc

SEQ ID NO: 42469 - DNA, 25 bp, Artificial Sequence
  Synthetic: FXN 3 forward 9:69044625-69044653; SpCas9
ccagctgaggtccttggcaagaccc

SEQ ID NO: 42470 - DNA, 24 bp, Artificial Sequence
  Synthetic: FXN 3 forward 9:69044626-69044653; SpCas9
cagctgaggtccttggcaagaccc

SEQ ID NO: 42471 - DNA, 23 bp, Artificial Sequence
  Synthetic: FXN 3 forward 9:69044627-69044653; SpCas9
agctgaggtccttggcaagaccc

SEQ ID NO: 42472 - DNA, 22 bp, Artificial Sequence
  Synthetic: FXN 3 forward 9:69044628-69044653; SpCas9
gctgaggtccttggcaagaccc

SEQ ID NO: 42473 - DNA, 21 bp, Artificial Sequence
  Synthetic: FXN 3 forward 9:69044629-69044653; SpCas9
ctgaggtccttggcaagaccc

SEQ ID NO: 42474 - DNA, 20 bp, Artificial Sequence
  Synthetic: FXN 3 forward 9:69044630-69044653; SpCas9
tgaggtccttggcaagaccc

SEQ ID NO: 42475 - DNA, 19 bp, Artificial Sequence
  Synthetic: FXN 3 forward 9:69044631-69044653; SpCas9
gaggtccttggcaagaccc

SEQ ID NO: 42476 - DNA, 18 bp, Artificial Sequence
  Synthetic: FXN 3 forward 9:69044632-69044653; SpCas9
aggtccttggcaagaccc

SEQ ID NO: 42477 - DNA, 25 bp, Artificial Sequence
  Synthetic: FXN 3 reverse 9:69044625-69044653; SpCas9
cctgggtcttgccaaggacctcagc

SEQ ID NO: 42478 - DNA, 24 bp, Artificial Sequence
  Synthetic: FXN 3 reverse 9:69044626-69044653; SpCas9
ctgggtcttgccaaggacctcagc

SEQ ID NO: 42479 - DNA, 23 bp, Artificial Sequence
  Synthetic: FXN 3 reverse 9:69044627-69044653; SpCas9
tgggtcttgccaaggacctcagc

SEQ ID NO: 42480 - DNA, 22 bp, Artificial Sequence
  Synthetic: FXN 3 reverse 9:69044628-69044653; SpCas9
gggtcttgccaaggacctcagc

SEQ ID NO: 42481 - DNA, 21 bp, Artificial Sequence
  Synthetic: FXN 3 reverse 9:69044629-69044653; SpCas9
ggtcttgccaaggacctcagc

SEQ ID NO: 42482 - DNA, 20 bp, Artificial Sequence
  Synthetic: FXN 3 reverse 9:69044630-69044653; SpCas9
gtcttgccaaggacctcagc

SEQ ID NO: 42483 - DNA, 19 bp, Artificial Sequence
  Synthetic: FXN 3 reverse 9:69044631-69044653; SpCas9
tcttgccaaggacctcagc

SEQ ID NO: 42484 - DNA, 18 bp, Artificial Sequence
  Synthetic: FXN 3 reverse 9:69044632-69044653; SpCas9
cttgccaaggacctcagc

SEQ ID NO: 42485 - DNA, 25 bp, Artificial Sequence
  Synthetic: FXN 3 forward 9:69044626-69044654; SpCas9
cagctgaggtccttggcaagaccca

SEQ ID NO: 42486 - DNA, 24 bp, Artificial Sequence
  Synthetic: FXN 3 forward 9:69044627-69044654; SpCas9
agctgaggtccttggcaagaccca

SEQ ID NO: 42487 - DNA, 23 bp, Artificial Sequence
  Synthetic: FXN 3 forward 9:69044628-69044654; SpCas9
gctgaggtccttggcaagaccca

SEQ ID NO: 42488 - DNA, 22 bp, Artificial Sequence
  Synthetic: FXN 3 forward 9:69044629-69044654; SpCas9
ctgaggtccttggcaagaccca

SEQ ID NO: 42489 - DNA, 21 bp, Artificial Sequence
  Synthetic: FXN 3 forward 9:69044630-69044654; SpCas9
tgaggtccttggcaagaccca

SEQ ID NO: 42490 - DNA, 20 bp, Artificial Sequence
  Synthetic: FXN 3 forward 9:69044631-69044654; SpCas9
gaggtccttggcaagaccca

SEQ ID NO: 42491 - DNA, 19 bp, Artificial Sequence
  Synthetic: FXN 3 forward 9:69044632-69044654; SpCas9
aggtccttggcaagaccca

SEQ ID NO: 42492 - DNA, 18 bp, Artificial Sequence
  Synthetic: FXN 3 forward 9:69044633-69044654; SpCas9
ggtccttggcaagaccca

SEQ ID NO: 42493 - DNA, 25 bp, Artificial Sequence
  Synthetic: FXN 3 reverse 9:69044629-69044657; SpCas9
gcgccctgggtcttgccaaggacct

SEQ ID NO: 42494 - DNA, 24 bp, Artificial Sequence
  Synthetic: FXN 3 reverse 9:69044630-69044657; SpCas9
cgccctgggtcttgccaaggacct

SEQ ID NO: 42495 - DNA, 23 bp, Artificial Sequence
  Synthetic: FXN 3 reverse 9:69044631-69044657; SpCas9
gccctgggtcttgccaaggacct

SEQ ID NO: 42496 - DNA, 22 bp, Artificial Sequence
  Synthetic: FXN 3 reverse 9:69044632-69044657; SpCas9
ccctgggtcttgccaaggacct

SEQ ID NO: 42497 - DNA, 21 bp, Artificial Sequence
  Synthetic: FXN 3 reverse 9:69044633-69044657; SpCas9
cctgggtcttgccaaggacct

SEQ ID NO: 42498 - DNA, 20 bp, Artificial Sequence
  Synthetic: FXN 3 reverse 9:69044634-69044657; SpCas9
ctgggtcttgccaaggacct

SEQ ID NO: 42499 - DNA, 19 bp, Artificial Sequence
  Synthetic: FXN 3 reverse 9:69044635-69044657; SpCas9
tgggtcttgccaaggacct

SEQ ID NO: 42500 - DNA, 18 bp, Artificial Sequence
  Synthetic: FXN 3 reverse 9:69044636-69044657; SpCas9
gggtcttgccaaggacct

SEQ ID NO: 42501 - DNA, 25 bp, Artificial Sequence
  Synthetic: FXN 3 reverse 9:69044636-69044664; SpCas9
ggagggggcgccctgggtcttgcca

SEQ ID NO: 42502 - DNA, 24 bp, Artificial Sequence
  Synthetic: FXN 3 reverse 9:69044637-69044664; SpCas9
gagggggcgccctgggtcttgcca

SEQ ID NO: 42503 - DNA, 23 bp, Artificial Sequence
  Synthetic: FXN 3 reverse 9:69044638-69044664; SpCas9
agggggcgccctgggtcttgcca

SEQ ID NO: 42504 - DNA, 22 bp, Artificial Sequence
  Synthetic: FXN 3 reverse 9:69044639-69044664; SpCas9
gggggcgccctgggtcttgcca

SEQ ID NO: 42505 - DNA, 21 bp, Artificial Sequence
  Synthetic: FXN 3 reverse 9:69044640-69044664; SpCas9
ggggcgccctgggtcttgcca

SEQ ID NO: 42506 - DNA, 20 bp, Artificial Sequence
  Synthetic: FXN 3 reverse 9:69044641-69044664; SpCas9
gggcgccctgggtcttgcca

SEQ ID NO: 42507 - DNA, 19 bp, Artificial Sequence
  Synthetic: FXN 3 reverse 9:69044642-69044664; SpCas9
ggcgccctgggtcttgcca

SEQ ID NO: 42508 - DNA, 18 bp, Artificial Sequence
  Synthetic: FXN 3 reverse 9:69044643-69044664; SpCas9
gcgccctgggtcttgcca

SEQ ID NO: 42509 - DNA, 25 bp, Artificial Sequence
  Synthetic: FXN 3 reverse 9:69044637-69044665; SpCas9
aggagggggcgccctgggtcttgcc

SEQ ID NO: 42510 - DNA, 24 bp, Artificial Sequence
  Synthetic: FXN 3 reverse 9:69044638-69044665; SpCas9
ggagggggcgccctgggtcttgcc

SEQ ID NO: 42511 - DNA, 23 bp, Artificial Sequence
  Synthetic: FXN 3 reverse 9:69044639-69044665; SpCas9
gagggggcgccctgggtcttgcc

SEQ ID NO: 42512 - DNA, 22 bp, Artificial Sequence
  Synthetic: FXN 3 reverse 9:69044640-69044665; SpCas9
agggggcgccctgggtcttgcc

SEQ ID NO: 42513 - DNA, 21 bp, Artificial Sequence
  Synthetic: FXN 3 reverse 9:69044641-69044665; SpCas9
gggggcgccctgggtcttgcc

SEQ ID NO: 42514 - DNA, 20 bp, Artificial Sequence
  Synthetic: FXN 3 reverse 9:69044642-69044665; SpCas9
ggggcgccctgggtcttgcc

SEQ ID NO: 42515 - DNA, 19 bp, Artificial Sequence
  Synthetic: FXN 3 reverse 9:69044643-69044665; SpCas9
gggcgccctgggtcttgcc

SEQ ID NO: 42516 - DNA, 18 bp, Artificial Sequence
  Synthetic: FXN 3 reverse 9:69044644-69044665; SpCas9
ggcgccctgggtcttgcc

SEQ ID NO: 42517 - DNA, 25 bp, Artificial Sequence
  Synthetic: FXN 3 reverse 9:69044647-69044675; SpCas9
tgatggagcgaggagggggcgccct

SEQ ID NO: 42518 - DNA, 24 bp, Artificial Sequence
  Synthetic: FXN 3 reverse 9:69044648-69044675; SpCas9
gatggagcgaggagggggcgccct

SEQ ID NO: 42519 - DNA, 23 bp, Artificial Sequence
  Synthetic: FXN 3 reverse 9:69044649-69044675; SpCas9
atggagcgaggagggggcgccct

SEQ ID NO: 42520 - DNA, 22 bp, Artificial Sequence
  Synthetic: FXN 3 reverse 9:69044650-69044675; SpCas9
tggagcgaggagggggcgccct

SEQ ID NO: 42521 - DNA, 21 bp, Artificial Sequence
  Synthetic: FXN 3 reverse 9:69044651-69044675; SpCas9
ggagcgaggagggggcgccct

SEQ ID NO: 42522 - DNA, 20 bp, Artificial Sequence
  Synthetic: FXN 3 reverse 9:69044652-69044675; SpCas9
gagcgaggagggggcgccct

SEQ ID NO: 42523 - DNA, 19 bp, Artificial Sequence
  Synthetic: FXN 3 reverse 9:69044653-69044675; SpCas9
agcgaggagggggcgccct

SEQ ID NO: 42524 - DNA, 18 bp, Artificial Sequence
  Synthetic: FXN 3 reverse 9:69044654-69044675; SpCas9
gcgaggagggggcgccct

SEQ ID NO: 42525 - DNA, 25 bp, Artificial Sequence
  Synthetic: FXN 3 reverse 9:69044648-69044676; SpCas9
gtgatggagcgaggagggggcgccc

SEQ ID NO: 42526 - DNA, 24 bp, Artificial Sequence
  Synthetic: FXN 3 reverse 9:69044649-69044676; SpCas9
tgatggagcgaggagggggcgccc

SEQ ID NO: 42527 - DNA, 23 bp, Artificial Sequence
  Synthetic: FXN 3 reverse 9:69044650-69044676; SpCas9
gatggagcgaggagggggcgccc

SEQ ID NO: 42528 - DNA, 22 bp, Artificial Sequence
  Synthetic: FXN 3 reverse 9:69044651-69044676; SpCas9
atggagcgaggagggggcgccc

SEQ ID NO: 42529 - DNA, 21 bp, Artificial Sequence
  Synthetic: FXN 3 reverse 9:69044652-69044676; SpCas9
tggagcgaggagggggcgccc

SEQ ID NO: 42530 - DNA, 20 bp, Artificial Sequence
  Synthetic: FXN 3 reverse 9:69044653-69044676; SpCas9
ggagcgaggagggggcgccc

SEQ ID NO: 42531 - DNA, 19 bp, Artificial Sequence
  Synthetic: FXN 3 reverse 9:69044654-69044676; SpCas9
gagcgaggagggggcgccc

SEQ ID NO: 42532 - DNA, 18 bp, Artificial Sequence
  Synthetic: FXN 3 reverse 9:69044655-69044676; SpCas9
agcgaggagggggcgccc

SEQ ID NO: 42533 - DNA, 25 bp, Artificial Sequence
  Synthetic: FXN 3 reverse 9:69044656-69044684; SpCas9
caggggaggtgatggagcgaggagg

SEQ ID NO: 42534 - DNA, 24 bp, Artificial Sequence
  Synthetic: FXN 3 reverse 9:69044657-69044684; SpCas9
aggggaggtgatggagcgaggagg

SEQ ID NO: 42535 - DNA, 23 bp, Artificial Sequence
  Synthetic: FXN 3 reverse 9:69044658-69044684; SpCas9
ggggaggtgatggagcgaggagg

SEQ ID NO: 42536 - DNA, 22 bp, Artificial Sequence
  Synthetic: FXN 3 reverse 9:69044659-69044684; SpCas9
gggaggtgatggagcgaggagg

SEQ ID NO: 42537 - DNA, 21 bp, Artificial Sequence
  Synthetic: FXN 3 reverse 9:69044660-69044684; SpCas9
ggaggtgatggagcgaggagg

SEQ ID NO: 42538 - DNA, 20 bp, Artificial Sequence
  Synthetic: FXN 3 reverse 9:69044661-69044684; SpCas9
gaggtgatggagcgaggagg

SEQ ID NO: 42539 - DNA, 19 bp, Artificial Sequence
  Synthetic: FXN 3 reverse 9:69044662-69044684; SpCas9
aggtgatggagcgaggagg

SEQ ID NO: 42540 - DNA, 18 bp, Artificial Sequence
  Synthetic: FXN 3 reverse 9:69044663-69044684; SpCas9
ggtgatggagcgaggagg

SEQ ID NO: 42541 - DNA, 25 bp, Artificial Sequence
  Synthetic: FXN 3 reverse 9:69044657-69044685; SpCas9
acaggggaggtgatggagcgaggag

SEQ ID NO: 42542 - DNA, 24 bp, Artificial Sequence
  Synthetic: FXN 3 reverse 9:69044658-69044685; SpCas9
caggggaggtgatggagcgaggag

SEQ ID NO: 42543 - DNA, 23 bp, Artificial Sequence
  Synthetic: FXN 3 reverse 9:69044659-69044685; SpCas9
aggggaggtgatggagcgaggag

SEQ ID NO: 42544 - DNA, 22 bp, Artificial Sequence
  Synthetic: FXN 3 reverse 9:69044660-69044685; SpCas9
ggggaggtgatggagcgaggag

SEQ ID NO: 42545 - DNA, 21 bp, Artificial Sequence
  Synthetic: FXN 3 reverse 9:69044661-69044685; SpCas9
gggaggtgatggagcgaggag

SEQ ID NO: 42546 - DNA, 20 bp, Artificial Sequence
  Synthetic: FXN 3 reverse 9:69044662-69044685; SpCas9
ggaggtgatggagcgaggag

SEQ ID NO: 42547 - DNA, 19 bp, Artificial Sequence
  Synthetic: FXN 3 reverse 9:69044663-69044685; SpCas9
gaggtgatggagcgaggag

SEQ ID NO: 42548 - DNA, 18 bp, Artificial Sequence
  Synthetic: FXN 3 reverse 9:69044664-69044685; SpCas9
aggtgatggagcgaggag

SEQ ID NO: 42549 - DNA, 25 bp, Artificial Sequence
  Synthetic: FXN 3 reverse 9:69044658-69044686; SpCas9
gacaggggaggtgatggagcgagga

SEQ ID NO: 42550 - DNA, 24 bp, Artificial Sequence
  Synthetic: FXN 3 reverse 9:69044659-69044686; SpCas9
acaggggaggtgatggagcgagga

SEQ ID NO: 42551 - DNA, 23 bp, Artificial Sequence
  Synthetic: FXN 3 reverse 9:69044660-69044686; SpCas9
caggggaggtgatggagcgagga

SEQ ID NO: 42552 - DNA, 22 bp, Artificial Sequence
  Synthetic: FXN 3 reverse 9:69044661-69044686; SpCas9
aggggaggtgatggagcgagga

SEQ ID NO: 42553 - DNA, 21 bp, Artificial Sequence
  Synthetic: FXN 3 reverse 9:69044662-69044686; SpCas9
ggggaggtgatggagcgagga

SEQ ID NO: 42554 - DNA, 20 bp, Artificial Sequence
  Synthetic: FXN 3 reverse 9:69044663-69044686; SpCas9
gggaggtgatggagcgagga

SEQ ID NO: 42555 - DNA, 19 bp, Artificial Sequence
  Synthetic: FXN 3 reverse 9:69044664-69044686; SpCas9
ggaggtgatggagcgagga

SEQ ID NO: 42556 - DNA, 18 bp, Artificial Sequence
  Synthetic: FXN 3 reverse 9:69044665-69044686; SpCas9
gaggtgatggagcgagga

SEQ ID NO: 42557 - DNA, 25 bp, Artificial Sequence
  Synthetic: FXN 3 reverse 9:69044659-69044687; SpCas9
tgacaggggaggtgatggagcgagg

SEQ ID NO: 42558 - DNA, 24 bp, Artificial Sequence
  Synthetic: FXN 3 reverse 9:69044660-69044687; SpCas9
gacaggggaggtgatggagcgagg

SEQ ID NO: 42559 - DNA, 23 bp, Artificial Sequence
  Synthetic: FXN 3 reverse 9:69044661-69044687; SpCas9
acaggggaggtgatggagcgagg

SEQ ID NO: 42560 - DNA, 22 bp, Artificial Sequence
  Synthetic: FXN 3 reverse 9:69044662-69044687; SpCas9
caggggaggtgatggagcgagg

SEQ ID NO: 42561 - DNA, 21 bp, Artificial Sequence
  Synthetic: FXN 3 reverse 9:69044663-69044687; SpCas9
aggggaggtgatggagcgagg

SEQ ID NO: 42562 - DNA, 20 bp, Artificial Sequence
  Synthetic: FXN 3 reverse 9:69044664-69044687; SpCas9
ggggaggtgatggagcgagg

SEQ ID NO: 42563 - DNA, 19 bp, Artificial Sequence
  Synthetic: FXN 3 reverse 9:69044665-69044687; SpCas9
gggaggtgatggagcgagg

SEQ ID NO: 42564 - DNA, 18 bp, Artificial Sequence
  Synthetic: FXN 3 reverse 9:69044666-69044687; SpCas9
ggaggtgatggagcgagg

SEQ ID NO: 42565 - DNA, 25 bp, Artificial Sequence
  Synthetic: FXN 3 reverse 9:69044660-69044688; SpCas9
gtgacaggggaggtgatggagcgag

SEQ ID NO: 42566 - DNA, 24 bp, Artificial Sequence
  Synthetic: FXN 3 reverse 9:69044661-69044688; SpCas9
tgacaggggaggtgatggagcgag

SEQ ID NO: 42567 - DNA, 23 bp, Artificial Sequence
  Synthetic: FXN 3 reverse 9:69044662-69044688; SpCas9
gacaggggaggtgatggagcgag

SEQ ID NO: 42568 - DNA, 22 bp, Artificial Sequence
  Synthetic: FXN 3 reverse 9:69044663-69044688; SpCas9
acaggggaggtgatggagcgag

SEQ ID NO: 42569 - DNA, 21 bp, Artificial Sequence
  Synthetic: FXN 3 reverse 9:69044664-69044688; SpCas9
caggggaggtgatggagcgag

SEQ ID NO: 42570 - DNA, 20 bp, Artificial Sequence
  Synthetic: FXN 3 reverse 9:69044665-69044688; SpCas9
aggggaggtgatggagcgag

SEQ ID NO: 42571 - DNA, 19 bp, Artificial Sequence
  Synthetic: FXN 3 reverse 9:69044666-69044688; SpCas9
ggggaggtgatggagcgag

SEQ ID NO: 42572 - DNA, 18 bp, Artificial Sequence
  Synthetic: FXN 3 reverse 9:69044667-69044688; SpCas9
gggaggtgatggagcgag

SEQ ID NO: 42573 - DNA, 25 bp, Artificial Sequence
  Synthetic: FXN 3 reverse 9:69044662-69044690; SpCas9
aggtgacaggggaggtgatggagcg

SEQ ID NO: 42574 - DNA, 24 bp, Artificial Sequence
  Synthetic: FXN 3 reverse 9:69044663-69044690; SpCas9
ggtgacaggggaggtgatggagcg

SEQ ID NO: 42575 - DNA, 23 bp, Artificial Sequence
  Synthetic: FXN 3 reverse 9:69044664-69044690; SpCas9
gtgacaggggaggtgatggagcg

SEQ ID NO: 42576 - DNA, 22 bp, Artificial Sequence
  Synthetic: FXN 3 reverse 9:69044665-69044690; SpCas9
tgacaggggaggtgatggagcg

SEQ ID NO: 42577 - DNA, 21 bp, Artificial Sequence
  Synthetic: FXN 3 reverse 9:69044666-69044690; SpCas9
gacaggggaggtgatggagcg

SEQ ID NO: 42578 - DNA, 20 bp, Artificial Sequence
  Synthetic: FXN 3 reverse 9:69044667-69044690; SpCas9
acaggggaggtgatggagcg

SEQ ID NO: 42579 - DNA, 19 bp, Artificial Sequence
  Synthetic: FXN 3 reverse 9:69044668-69044690; SpCas9
caggggaggtgatggagcg

SEQ ID NO: 42580 - DNA, 18 bp, Artificial Sequence
  Synthetic: FXN 3 reverse 9:69044669-69044690; SpCas9
aggggaggtgatggagcg

SEQ ID NO: 42581 - DNA, 25 bp, Artificial Sequence
  Synthetic: FXN 3 reverse 9:69044663-69044691; SpCas9
gaggtgacaggggaggtgatggagc

SEQ ID NO: 42582 - DNA, 24 bp, Artificial Sequence
  Synthetic: FXN 3 reverse 9:69044664-69044691; SpCas9
aggtgacaggggaggtgatggagc

SEQ ID NO: 42583 - DNA, 23 bp, Artificial Sequence
  Synthetic: FXN 3 reverse 9:69044665-69044691; SpCas9
ggtgacaggggaggtgatggagc

SEQ ID NO: 42584 - DNA, 22 bp, Artificial Sequence
  Synthetic: FXN 3 reverse 9:69044666-69044691; SpCas9
gtgacaggggaggtgatggagc

SEQ ID NO: 42585 - DNA, 21 bp, Artificial Sequence
  Synthetic: FXN 3 reverse 9:69044667-69044691; SpCas9
tgacaggggaggtgatggagc

SEQ ID NO: 42586 - DNA, 20 bp, Artificial Sequence
  Synthetic: FXN 3 reverse 9:69044668-69044691; SpCas9
gacaggggaggtgatggagc

SEQ ID NO: 42587 - DNA, 19 bp, Artificial Sequence
  Synthetic: FXN 3 reverse 9:69044669-69044691; SpCas9
acaggggaggtgatggagc

SEQ ID NO: 42588 - DNA, 18 bp, Artificial Sequence
  Synthetic: FXN 3 reverse 9:69044670-69044691; SpCas9
caggggaggtgatggagc

SEQ ID NO: 42589 - DNA, 25 bp, Artificial Sequence
  Synthetic: FXN 3 reverse 9:69044667-69044695; SpCas9
aggggaggtgacaggggaggtgatg

SEQ ID NO: 42590 - DNA, 24 bp, Artificial Sequence
  Synthetic: FXN 3 reverse 9:69044668-69044695; SpCas9
ggggaggtgacaggggaggtgatg

SEQ ID NO: 42591 - DNA, 23 bp, Artificial Sequence
  Synthetic: FXN 3 reverse 9:69044669-69044695; SpCas9
gggaggtgacaggggaggtgatg

SEQ ID NO: 42592 - DNA, 22 bp, Artificial Sequence
  Synthetic: FXN 3 reverse 9:69044670-69044695; SpCas9
ggaggtgacaggggaggtgatg

SEQ ID NO: 42593 - DNA, 21 bp, Artificial Sequence
  Synthetic: FXN 3 reverse 9:69044671-69044695; SpCas9
gaggtgacaggggaggtgatg

SEQ ID NO: 42594 - DNA, 20 bp, Artificial Sequence
  Synthetic: FXN 3 reverse 9:69044672-69044695; SpCas9
aggtgacaggggaggtgatg

SEQ ID NO: 42595 - DNA, 19 bp, Artificial Sequence
  Synthetic: FXN 3 reverse 9:69044673-69044695; SpCas9
ggtgacaggggaggtgatg

SEQ ID NO: 42596 - DNA, 18 bp, Artificial Sequence
  Synthetic: FXN 3 reverse 9:69044674-69044695; SpCas9
gtgacaggggaggtgatg

SEQ ID NO: 42597 - DNA, 25 bp, Artificial Sequence
  Synthetic: FXN 3 reverse 9:69044669-69044697; SpCas9
gcaggggaggtgacaggggaggtga

SEQ ID NO: 42598 - DNA, 24 bp, Artificial Sequence
  Synthetic: FXN 3 reverse 9:69044670-69044697; SpCas9
caggggaggtgacaggggaggtga

SEQ ID NO: 42599 - DNA, 23 bp, Artificial Sequence
  Synthetic: FXN 3 reverse 9:69044671-69044697; SpCas9
aggggaggtgacaggggaggtga

SEQ ID NO: 42600 - DNA, 22 bp, Artificial Sequence
  Synthetic: FXN 3 reverse 9:69044672-69044697; SpCas9
ggggaggtgacaggggaggtga

SEQ ID NO: 42601 - DNA, 21 bp, Artificial Sequence
  Synthetic: FXN 3 reverse 9:69044673-69044697; SpCas9
gggaggtgacaggggaggtga

SEQ ID NO: 42602 - DNA, 20 bp, Artificial Sequence
  Synthetic: FXN 3 reverse 9:69044674-69044697; SpCas9
ggaggtgacaggggaggtga

SEQ ID NO: 42603 - DNA, 19 bp, Artificial Sequence
  Synthetic: FXN 3 reverse 9:69044675-69044697; SpCas9
gaggtgacaggggaggtga

SEQ ID NO: 42604 - DNA, 18 bp, Artificial Sequence
  Synthetic: FXN 3 reverse 9:69044676-69044697; SpCas9
aggtgacaggggaggtga

SEQ ID NO: 42605 - DNA, 25 bp, Artificial Sequence
  Synthetic: FXN 3 reverse 9:69044675-69044703; SpCas9
ggagatgcaggggaggtgacagggg

SEQ ID NO: 42606 - DNA, 24 bp, Artificial Sequence
  Synthetic: FXN 3 reverse 9:69044676-69044703; SpCas9
gagatgcaggggaggtgacagggg

SEQ ID NO: 42607 - DNA, 23 bp, Artificial Sequence
  Synthetic: FXN 3 reverse 9:69044677-69044703; SpCas9
agatgcaggggaggtgacagggg

SEQ ID NO: 42608 - DNA, 22 bp, Artificial Sequence
  Synthetic: FXN 3 reverse 9:69044678-69044703; SpCas9
gatgcaggggaggtgacagggg

SEQ ID NO: 42609 - DNA, 21 bp, Artificial Sequence
  Synthetic: FXN 3 reverse 9:69044679-69044703; SpCas9
atgcaggggaggtgacagggg

SEQ ID NO: 42610 - DNA, 20 bp, Artificial Sequence
  Synthetic: FXN 3 reverse 9:69044680-69044703; SpCas9
tgcaggggaggtgacagggg

SEQ ID NO: 42611 - DNA, 19 bp, Artificial Sequence
  Synthetic: FXN 3 reverse 9:69044681-69044703; SpCas9
gcaggggaggtgacagggg

SEQ ID NO: 42612 - DNA, 18 bp, Artificial Sequence
  Synthetic: FXN 3 reverse 9:69044682-69044703; SpCas9
caggggaggtgacagggg

SEQ ID NO: 42613 - DNA, 25 bp, Artificial Sequence
  Synthetic: FXN 3 reverse 9:69044676-69044704; SpCas9
gggagatgcaggggaggtgacaggg

SEQ ID NO: 42614 - DNA, 24 bp, Artificial Sequence
  Synthetic: FXN 3 reverse 9:69044677-69044704; SpCas9
ggagatgcaggggaggtgacaggg

SEQ ID NO: 42615 - DNA, 23 bp, Artificial Sequence
  Synthetic: FXN 3 reverse 9:69044678-69044704; SpCas9
gagatgcaggggaggtgacaggg

SEQ ID NO: 42616 - DNA, 22 bp, Artificial Sequence
  Synthetic: FXN 3 reverse 9:69044679-69044704; SpCas9
agatgcaggggaggtgacaggg

SEQ ID NO: 42617 - DNA, 21 bp, Artificial Sequence
  Synthetic: FXN 3 reverse 9:69044680-69044704; SpCas9
gatgcaggggaggtgacaggg

SEQ ID NO: 42618 - DNA, 20 bp, Artificial Sequence
  Synthetic: FXN 3 reverse 9:69044681-69044704; SpCas9
atgcaggggaggtgacaggg

SEQ ID NO: 42619 - DNA, 19 bp, Artificial Sequence
  Synthetic: FXN 3 reverse 9:69044682-69044704; SpCas9
tgcaggggaggtgacaggg

SEQ ID NO: 42620 - DNA, 18 bp, Artificial Sequence
  Synthetic: FXN 3 reverse 9:69044683-69044704; SpCas9
gcaggggaggtgacaggg

SEQ ID NO: 42621 - DNA, 25 bp, Artificial Sequence
  Synthetic: FXN 3 reverse 9:69044678-69044706; SpCas9
tagggagatgcaggggaggtgacag

SEQ ID NO: 42622 - DNA, 24 bp, Artificial Sequence
  Synthetic: FXN 3 reverse 9:69044679-69044706; SpCas9
agggagatgcaggggaggtgacag

SEQ ID NO: 42623 - DNA, 23 bp, Artificial Sequence
  Synthetic: FXN 3 reverse 9:69044680-69044706; SpCas9
gggagatgcaggggaggtgacag

SEQ ID NO: 42624 - DNA, 22 bp, Artificial Sequence
  Synthetic: FXN 3 reverse 9:69044681-69044706; SpCas9
ggagatgcaggggaggtgacag

SEQ ID NO: 42625 - DNA, 21 bp, Artificial Sequence
  Synthetic: FXN 3 reverse 9:69044682-69044706; SpCas9
gagatgcaggggaggtgacag

SEQ ID NO: 42626 - DNA, 20 bp, Artificial Sequence
  Synthetic: FXN 3 reverse 9:69044683-69044706; SpCas9
agatgcaggggaggtgacag

SEQ ID NO: 42627 - DNA, 19 bp, Artificial Sequence
  Synthetic: FXN 3 reverse 9:69044684-69044706; SpCas9
gatgcaggggaggtgacag

SEQ ID NO: 42628 - DNA, 18 bp, Artificial Sequence
  Synthetic: FXN 3 reverse 9:69044685-69044706; SpCas9
atgcaggggaggtgacag

SEQ ID NO: 42629 - DNA, 25 bp, Artificial Sequence
  Synthetic: FXN 3 reverse 9:69044679-69044707; SpCas9
gtagggagatgcaggggaggtgaca

SEQ ID NO: 42630 - DNA, 24 bp, Artificial Sequence
  Synthetic: FXN 3 reverse 9:69044680-69044707; SpCas9
tagggagatgcaggggaggtgaca

SEQ ID NO: 42631 - DNA, 23 bp, Artificial Sequence
  Synthetic: FXN 3 reverse 9:69044681-69044707; SpCas9
agggagatgcaggggaggtgaca

SEQ ID NO: 42632 - DNA, 22 bp, Artificial Sequence
  Synthetic: FXN 3 reverse 9:69044682-69044707; SpCas9
gggagatgcaggggaggtgaca

SEQ ID NO: 42633 - DNA, 21 bp, Artificial Sequence
  Synthetic: FXN 3 reverse 9:69044683-69044707; SpCas9
ggagatgcaggggaggtgaca

SEQ ID NO: 42634 - DNA, 20 bp, Artificial Sequence
  Synthetic: FXN 3 reverse 9:69044684-69044707; SpCas9
gagatgcaggggaggtgaca

SEQ ID NO: 42635 - DNA, 19 bp, Artificial Sequence
  Synthetic: FXN 3 reverse 9:69044685-69044707; SpCas9
agatgcaggggaggtgaca

SEQ ID NO: 42636 - DNA, 18 bp, Artificial Sequence
  Synthetic: FXN 3 reverse 9:69044686-69044707; SpCas9
gatgcaggggaggtgaca

SEQ ID NO: 42637 - DNA, 25 bp, Artificial Sequence
  Synthetic: FXN 3 reverse 9:69044680-69044708; SpCas9
agtagggagatgcaggggaggtgac

SEQ ID NO: 42638 - DNA, 24 bp, Artificial Sequence
  Synthetic: FXN 3 reverse 9:69044681-69044708; SpCas9
gtagggagatgcaggggaggtgac

SEQ ID NO: 42639 - DNA, 23 bp, Artificial Sequence
  Synthetic: FXN 3 reverse 9:69044682-69044708; SpCas9
tagggagatgcaggggaggtgac

SEQ ID NO: 42640 - DNA, 22 bp, Artificial Sequence
  Synthetic: FXN 3 reverse 9:69044683-69044708; SpCas9
agggagatgcaggggaggtgac

SEQ ID NO: 42641 - DNA, 21 bp, Artificial Sequence
  Synthetic: FXN 3 reverse 9:69044684-69044708; SpCas9
gggagatgcaggggaggtgac

SEQ ID NO: 42642 - DNA, 20 bp, Artificial Sequence
  Synthetic: FXN 3 reverse 9:69044685-69044708; SpCas9
ggagatgcaggggaggtgac

SEQ ID NO: 42643 - DNA, 19 bp, Artificial Sequence
  Synthetic: FXN 3 reverse 9:69044686-69044708; SpCas9
gagatgcaggggaggtgac

SEQ ID NO: 42644 - DNA, 18 bp, Artificial Sequence
  Synthetic: FXN 3 reverse 9:69044687-69044708; SpCas9
agatgcaggggaggtgac

SEQ ID NO: 42645 - DNA, 25 bp, Artificial Sequence
  Synthetic: FXN 3 reverse 9:69044681-69044709; SpCas9
gagtagggagatgcaggggaggtga

SEQ ID NO: 42646 - DNA, 24 bp, Artificial Sequence
  Synthetic: FXN 3 reverse 9:69044682-69044709; SpCas9
agtagggagatgcaggggaggtga

SEQ ID NO: 42647 - DNA, 23 bp, Artificial Sequence
  Synthetic: FXN 3 reverse 9:69044683-69044709; SpCas9
gtagggagatgcaggggaggtga

SEQ ID NO: 42648 - DNA, 22 bp, Artificial Sequence
  Synthetic: FXN 3 reverse 9:69044684-69044709; SpCas9
tagggagatgcaggggaggtga

SEQ ID NO: 42649 - DNA, 21 bp, Artificial Sequence
  Synthetic: FXN 3 reverse 9:69044685-69044709; SpCas9
agggagatgcaggggaggtga

SEQ ID NO: 42650 - DNA, 20 bp, Artificial Sequence
  Synthetic: FXN 3 reverse 9:69044686-69044709; SpCas9
gggagatgcaggggaggtga

SEQ ID NO: 42651 - DNA, 19 bp, Artificial Sequence
  Synthetic: FXN 3 reverse 9:69044687-69044709; SpCas9
ggagatgcaggggaggtga

SEQ ID NO: 42652 - DNA, 18 bp, Artificial Sequence
  Synthetic: FXN 3 reverse 9:69044688-69044709; SpCas9
gagatgcaggggaggtga

SEQ ID NO: 42653 - DNA, 25 bp, Artificial Sequence
  Synthetic: FXN 3 forward 9:69044684-69044712; SpCas9
tcacctcccctgcatctccctactc

SEQ ID NO: 42654 - DNA, 24 bp, Artificial Sequence
  Synthetic: FXN 3 forward 9:69044685-69044712; SpCas9
cacctcccctgcatctccctactc

SEQ ID NO: 42655 - DNA, 23 bp, Artificial Sequence
  Synthetic: FXN 3 forward 9:69044686-69044712; SpCas9
acctcccctgcatctccctactc

SEQ ID NO: 42656 - DNA, 22 bp, Artificial Sequence
  Synthetic: FXN 3 forward 9:69044687-69044712; SpCas9
cctcccctgcatctccctactc

SEQ ID NO: 42657 - DNA, 21 bp, Artificial Sequence
  Synthetic: FXN 3 forward 9:69044688-69044712; SpCas9
ctcccctgcatctccctactc

SEQ ID NO: 42658 - DNA, 20 bp, Artificial Sequence
  Synthetic: FXN 3 forward 9:69044689-69044712; SpCas9
tcccctgcatctccctactc

SEQ ID NO: 42659 - DNA, 19 bp, Artificial Sequence
  Synthetic: FXN 3 forward 9:69044690-69044712; SpCas9
cccctgcatctccctactc

SEQ ID NO: 42660 - DNA, 18 bp, Artificial Sequence
  Synthetic: FXN 3 forward 9:69044691-69044712; SpCas9
ccctgcatctccctactc

SEQ ID NO: 42661 - DNA, 25 bp, Artificial Sequence
  Synthetic: FXN 3 reverse 9:69044687-69044715; SpCas9
cagctggagtagggagatgcagggg

SEQ ID NO: 42662 - DNA, 24 bp, Artificial Sequence
  Synthetic: FXN 3 reverse 9:69044688-69044715; SpCas9
agctggagtagggagatgcagggg

SEQ ID NO: 42663 - DNA, 23 bp, Artificial Sequence
  Synthetic: FXN 3 reverse 9:69044689-69044715; SpCas9
gctggagtagggagatgcagggg

SEQ ID NO: 42664 - DNA, 22 bp, Artificial Sequence
  Synthetic: FXN 3 reverse 9:69044690-69044715; SpCas9
ctggagtagggagatgcagggg

SEQ ID NO: 42665 - DNA, 21 bp, Artificial Sequence
  Synthetic: FXN 3 reverse 9:69044691-69044715; SpCas9
tggagtagggagatgcagggg

SEQ ID NO: 42666 - DNA, 20 bp, Artificial Sequence
  Synthetic: FXN 3 reverse 9:69044692-69044715; SpCas9
ggagtagggagatgcagggg

SEQ ID NO: 42667 - DNA, 19 bp, Artificial Sequence
  Synthetic: FXN 3 reverse 9:69044693-69044715; SpCas9
gagtagggagatgcagggg

SEQ ID NO: 42668 - DNA, 18 bp, Artificial Sequence
  Synthetic: FXN 3 reverse 9:69044694-69044715; SpCas9
agtagggagatgcagggg

SEQ ID NO: 42669 - DNA, 25 bp, Artificial Sequence
  Synthetic: FXN 3 reverse 9:69044688-69044716; SpCas9
gcagctggagtagggagatgcaggg

SEQ ID NO: 42670 - DNA, 24 bp, Artificial Sequence
  Synthetic: FXN 3 reverse 9:69044689-69044716; SpCas9
cagctggagtagggagatgcaggg

SEQ ID NO: 42671 - DNA, 23 bp, Artificial Sequence
  Synthetic: FXN 3 reverse 9:69044690-69044716; SpCas9
agctggagtagggagatgcaggg

SEQ ID NO: 42672 - DNA, 22 bp, Artificial Sequence
  Synthetic: FXN 3 reverse 9:69044691-69044716; SpCas9
gctggagtagggagatgcaggg

SEQ ID NO: 42673 - DNA, 21 bp, Artificial Sequence
  Synthetic: FXN 3 reverse 9:69044692-69044716; SpCas9
ctggagtagggagatgcaggg

SEQ ID NO: 42674 - DNA, 20 bp, Artificial Sequence
  Synthetic: FXN 3 reverse 9:69044693-69044716; SpCas9
tggagtagggagatgcaggg

SEQ ID NO: 42675 - DNA, 19 bp, Artificial Sequence
  Synthetic: FXN 3 reverse 9:69044694-69044716; SpCas9
ggagtagggagatgcaggg

SEQ ID NO: 42676 - DNA, 18 bp, Artificial Sequence
  Synthetic: FXN 3 reverse 9:69044695-69044716; SpCas9
gagtagggagatgcaggg

SEQ ID NO: 42677 - DNA, 25 bp, Artificial Sequence
  Synthetic: FXN 3 reverse 9:69044690-69044718; SpCas9
gtgcagctggagtagggagatgcag

SEQ ID NO: 42678 - DNA, 24 bp, Artificial Sequence
  Synthetic: FXN 3 reverse 9:69044691-69044718; SpCas9
tgcagctggagtagggagatgcag

SEQ ID NO: 42679 - DNA, 23 bp, Artificial Sequence
  Synthetic: FXN 3 reverse 9:69044692-69044718; SpCas9
gcagctggagtagggagatgcag

SEQ ID NO: 42680 - DNA, 22 bp, Artificial Sequence
  Synthetic: FXN 3 reverse 9:69044693-69044718; SpCas9
cagctggagtagggagatgcag

SEQ ID NO: 42681 - DNA, 21 bp, Artificial Sequence
  Synthetic: FXN 3 reverse 9:69044694-69044718; SpCas9
agctggagtagggagatgcag

SEQ ID NO: 42682 - DNA, 20 bp, Artificial Sequence
  Synthetic: FXN 3 reverse 9:69044695-69044718; SpCas9
gctggagtagggagatgcag

SEQ ID NO: 42683 - DNA, 19 bp, Artificial Sequence
  Synthetic: FXN 3 reverse 9:69044696-69044718; SpCas9
ctggagtagggagatgcag

SEQ ID NO: 42684 - DNA, 18 bp, Artificial Sequence
  Synthetic: FXN 3 reverse 9:69044697-69044718; SpCas9
tggagtagggagatgcag

SEQ ID NO: 42685 - DNA, 25 bp, Artificial Sequence
  Synthetic: FXN 3 reverse 9:69044691-69044719; SpCas9
ggtgcagctggagtagggagatgca

SEQ ID NO: 42686 - DNA, 24 bp, Artificial Sequence
  Synthetic: FXN 3 reverse 9:69044692-69044719; SpCas9
gtgcagctggagtagggagatgca

SEQ ID NO: 42687 - DNA, 23 bp, Artificial Sequence
  Synthetic: FXN 3 reverse 9:69044693-69044719; SpCas9
tgcagctggagtagggagatgca

SEQ ID NO: 42688 - DNA, 22 bp, Artificial Sequence
  Synthetic: FXN 3 reverse 9:69044694-69044719; SpCas9
gcagctggagtagggagatgca

SEQ ID NO: 42689 - DNA, 21 bp, Artificial Sequence
  Synthetic: FXN 3 reverse 9:69044695-69044719; SpCas9
cagctggagtagggagatgca

SEQ ID NO: 42690 - DNA, 20 bp, Artificial Sequence
  Synthetic: FXN 3 reverse 9:69044696-69044719; SpCas9
agctggagtagggagatgca

SEQ ID NO: 42691 - DNA, 19 bp, Artificial Sequence
  Synthetic: FXN 3 reverse 9:69044697-69044719; SpCas9
gctggagtagggagatgca

SEQ ID NO: 42692 - DNA, 18 bp, Artificial Sequence
  Synthetic: FXN 3 reverse 9:69044698-69044719; SpCas9
ctggagtagggagatgca

SEQ ID NO: 42693 - DNA, 25 bp, Artificial Sequence
  Synthetic: FXN 3 reverse 9:69044692-69044720; SpCas9
tggtgcagctggagtagggagatgc

SEQ ID NO: 42694 - DNA, 24 bp, Artificial Sequence
  Synthetic: FXN 3 reverse 9:69044693-69044720; SpCas9
ggtgcagctggagtagggagatgc

SEQ ID NO: 42695 - DNA, 23 bp, Artificial Sequence
  Synthetic: FXN 3 reverse 9:69044694-69044720; SpCas9
gtgcagctggagtagggagatgc

SEQ ID NO: 42696 - DNA, 22 bp, Artificial Sequence
  Synthetic: FXN 3 reverse 9:69044695-69044720; SpCas9
tgcagctggagtagggagatgc

SEQ ID NO: 42697 - DNA, 21 bp, Artificial Sequence
  Synthetic: FXN 3 reverse 9:69044696-69044720; SpCas9
gcagctggagtagggagatgc

SEQ ID NO: 42698 - DNA, 20 bp, Artificial Sequence
  Synthetic: FXN 3 reverse 9:69044697-69044720; SpCas9
cagctggagtagggagatgc

SEQ ID NO: 42699 - DNA, 19 bp, Artificial Sequence
  Synthetic: FXN 3 reverse 9:69044698-69044720; SpCas9
agctggagtagggagatgc

SEQ ID NO: 42700 - DNA, 18 bp, Artificial Sequence
  Synthetic: FXN 3 reverse 9:69044699-69044720; SpCas9
gctggagtagggagatgc

SEQ ID NO: 42701 - DNA, 25 bp, Artificial Sequence
  Synthetic: FXN 3 reverse 9:69044693-69044721; SpCas9
gtggtgcagctggagtagggagatg

SEQ ID NO: 42702 - DNA, 24 bp, Artificial Sequence
  Synthetic: FXN 3 reverse 9:69044694-69044721; SpCas9
tggtgcagctggagtagggagatg

SEQ ID NO: 42703 - DNA, 23 bp, Artificial Sequence
  Synthetic: FXN 3 reverse 9:69044695-69044721; SpCas9
ggtgcagctggagtagggagatg

SEQ ID NO: 42704 - DNA, 22 bp, Artificial Sequence
  Synthetic: FXN 3 reverse 9:69044696-69044721; SpCas9
gtgcagctggagtagggagatg

SEQ ID NO: 42705 - DNA, 21 bp, Artificial Sequence
  Synthetic: FXN 3 reverse 9:69044697-69044721; SpCas9
tgcagctggagtagggagatg

SEQ ID NO: 42706 - DNA, 20 bp, Artificial Sequence
  Synthetic: FXN 3 reverse 9:69044698-69044721; SpCas9
gcagctggagtagggagatg

SEQ ID NO: 42707 - DNA, 19 bp, Artificial Sequence
  Synthetic: FXN 3 reverse 9:69044699-69044721; SpCas9
cagctggagtagggagatg

SEQ ID NO: 42708 - DNA, 18 bp, Artificial Sequence
  Synthetic: FXN 3 reverse 9:69044700-69044721; SpCas9
agctggagtagggagatg

SEQ ID NO: 42709 - DNA, 25 bp, Artificial Sequence
  Synthetic: FXN 3 reverse 9:69044699-69044727; SpCas9
acaagagtggtgcagctggagtagg

SEQ ID NO: 42710 - DNA, 24 bp, Artificial Sequence
  Synthetic: FXN 3 reverse 9:69044700-69044727; SpCas9
caagagtggtgcagctggagtagg

SEQ ID NO: 42711 - DNA, 23 bp, Artificial Sequence
  Synthetic: FXN 3 reverse 9:69044701-69044727; SpCas9
aagagtggtgcagctggagtagg

SEQ ID NO: 42712 - DNA, 22 bp, Artificial Sequence
  Synthetic: FXN 3 reverse 9:69044702-69044727; SpCas9
agagtggtgcagctggagtagg

SEQ ID NO: 42713 - DNA, 21 bp, Artificial Sequence
  Synthetic: FXN 3 reverse 9:69044703-69044727; SpCas9
gagtggtgcagctggagtagg

SEQ ID NO: 42714 - DNA, 20 bp, Artificial Sequence
  Synthetic: FXN 3 reverse 9:69044704-69044727; SpCas9
agtggtgcagctggagtagg

SEQ ID NO: 42715 - DNA, 19 bp, Artificial Sequence
  Synthetic: FXN 3 reverse 9:69044705-69044727; SpCas9
gtggtgcagctggagtagg

SEQ ID NO: 42716 - DNA, 18 bp, Artificial Sequence
  Synthetic: FXN 3 reverse 9:69044706-69044727; SpCas9
tggtgcagctggagtagg

SEQ ID NO: 42717 - DNA, 25 bp, Artificial Sequence
  Synthetic: FXN 3 reverse 9:69044701-69044729; SpCas9
gcacaagagtggtgcagctggagta

SEQ ID NO: 42718 - DNA, 24 bp, Artificial Sequence
  Synthetic: FXN 3 reverse 9:69044702-69044729; SpCas9
cacaagagtggtgcagctggagta

SEQ ID NO: 42719 - DNA, 23 bp, Artificial Sequence
  Synthetic: FXN 3 reverse 9:69044703-69044729; SpCas9
acaagagtggtgcagctggagta

SEQ ID NO: 42720 - DNA, 22 bp, Artificial Sequence
  Synthetic: FXN 3 reverse 9:69044704-69044729; SpCas9
caagagtggtgcagctggagta

SEQ ID NO: 42721 - DNA, 21 bp, Artificial Sequence
  Synthetic: FXN 3 reverse 9:69044705-69044729; SpCas9
aagagtggtgcagctggagta

SEQ ID NO: 42722 - DNA, 20 bp, Artificial Sequence
  Synthetic: FXN 3 reverse 9:69044706-69044729; SpCas9
agagtggtgcagctggagta

SEQ ID NO: 42723 - DNA, 19 bp, Artificial Sequence
  Synthetic: FXN 3 reverse 9:69044707-69044729; SpCas9
gagtggtgcagctggagta

SEQ ID NO: 42724 - DNA, 18 bp, Artificial Sequence
  Synthetic: FXN 3 reverse 9:69044708-69044729; SpCas9
agtggtgcagctggagta

SEQ ID NO: 42725 - DNA, 25 bp, Artificial Sequence
  Synthetic: FXN 3 reverse 9:69044702-69044730; SpCas9
ggcacaagagtggtgcagctggagt

SEQ ID NO: 42726 - DNA, 24 bp, Artificial Sequence
  Synthetic: FXN 3 reverse 9:69044703-69044730; SpCas9
gcacaagagtggtgcagctggagt

SEQ ID NO: 42727 - DNA, 23 bp, Artificial Sequence
  Synthetic: FXN 3 reverse 9:69044704-69044730; SpCas9
cacaagagtggtgcagctggagt

SEQ ID NO: 42728 - DNA, 22 bp, Artificial Sequence
  Synthetic: FXN 3 reverse 9:69044705-69044730; SpCas9
acaagagtggtgcagctggagt

SEQ ID NO: 42729 - DNA, 21 bp, Artificial Sequence
  Synthetic: FXN 3 reverse 9:69044706-69044730; SpCas9
caagagtggtgcagctggagt

SEQ ID NO: 42730 - DNA, 20 bp, Artificial Sequence
  Synthetic: FXN 3 reverse 9:69044707-69044730; SpCas9
aagagtggtgcagctggagt

SEQ ID NO: 42731 - DNA, 19 bp, Artificial Sequence
  Synthetic: FXN 3 reverse 9:69044708-69044730; SpCas9
agagtggtgcagctggagt

SEQ ID NO: 42732 - DNA, 18 bp, Artificial Sequence
  Synthetic: FXN 3 reverse 9:69044709-69044730; SpCas9
gagtggtgcagctggagt

SEQ ID NO: 42733 - DNA, 25 bp, Artificial Sequence
  Synthetic: FXN 3 reverse 9:69044703-69044731; SpCas9
gggcacaagagtggtgcagctggag

SEQ ID NO: 42734 - DNA, 24 bp, Artificial Sequence
  Synthetic: FXN 3 reverse 9:69044704-69044731; SpCas9
ggcacaagagtggtgcagctggag

SEQ ID NO: 42735 - DNA, 23 bp, Artificial Sequence
  Synthetic: FXN 3 reverse 9:69044705-69044731; SpCas9
gcacaagagtggtgcagctggag

SEQ ID NO: 42736 - DNA, 22 bp, Artificial Sequence
  Synthetic: FXN 3 reverse 9:69044706-69044731; SpCas9
cacaagagtggtgcagctggag

SEQ ID NO: 42737 - DNA, 21 bp, Artificial Sequence
  Synthetic: FXN 3 reverse 9:69044707-69044731; SpCas9
acaagagtggtgcagctggag

SEQ ID NO: 42738 - DNA, 20 bp, Artificial Sequence
  Synthetic: FXN 3 reverse 9:69044708-69044731; SpCas9
caagagtggtgcagctggag

SEQ ID NO: 42739 - DNA, 19 bp, Artificial Sequence
  Synthetic: FXN 3 reverse 9:69044709-69044731; SpCas9
aagagtggtgcagctggag

SEQ ID NO: 42740 - DNA, 18 bp, Artificial Sequence
  Synthetic: FXN 3 reverse 9:69044710-69044731; SpCas9
agagtggtgcagctggag

SEQ ID NO: 42741 - DNA, 25 bp, Artificial Sequence
  Synthetic: FXN 3 forward 9:69044706-69044734; SpCas9
ctccagctgcaccactcttgtgccc

SEQ ID NO: 42742 - DNA, 24 bp, Artificial Sequence
  Synthetic: FXN 3 forward 9:69044707-69044734; SpCas9
tccagctgcaccactcttgtgccc

SEQ ID NO: 42743 - DNA, 23 bp, Artificial Sequence
  Synthetic: FXN 3 forward 9:69044708-69044734; SpCas9
ccagctgcaccactcttgtgccc

SEQ ID NO: 42744 - DNA, 22 bp, Artificial Sequence
  Synthetic: FXN 3 forward 9:69044709-69044734; SpCas9
cagctgcaccactcttgtgccc

SEQ ID NO: 42745 - DNA, 21 bp, Artificial Sequence
  Synthetic: FXN 3 forward 9:69044710-69044734; SpCas9
agctgcaccactcttgtgccc

SEQ ID NO: 42746 - DNA, 20 bp, Artificial Sequence
  Synthetic: FXN 3 forward 9:69044711-69044734; SpCas9
gctgcaccactcttgtgccc

SEQ ID NO: 42747 - DNA, 19 bp, Artificial Sequence
  Synthetic: FXN 3 forward 9:69044712-69044734; SpCas9
ctgcaccactcttgtgccc

SEQ ID NO: 42748 - DNA, 18 bp, Artificial Sequence
  Synthetic: FXN 3 forward 9:69044713-69044734; SpCas9
tgcaccactcttgtgccc

SEQ ID NO: 42749 - DNA, 25 bp, Artificial Sequence
  Synthetic: FXN 3 reverse 9:69044706-69044734; SpCas9
ctggggcacaagagtggtgcagctg

SEQ ID NO: 42750 - DNA, 24 bp, Artificial Sequence
  Synthetic: FXN 3 reverse 9:69044707-69044734; SpCas9
tggggcacaagagtggtgcagctg

SEQ ID NO: 42751 - DNA, 23 bp, Artificial Sequence
  Synthetic: FXN 3 reverse 9:69044708-69044734; SpCas9
ggggcacaagagtggtgcagctg

SEQ ID NO: 42752 - DNA, 22 bp, Artificial Sequence
  Synthetic: FXN 3 reverse 9:69044709-69044734; SpCas9
gggcacaagagtggtgcagctg

SEQ ID NO: 42753 - DNA, 21 bp, Artificial Sequence
  Synthetic: FXN 3 reverse 9:69044710-69044734; SpCas9
ggcacaagagtggtgcagctg

SEQ ID NO: 42754 - DNA, 20 bp, Artificial Sequence
  Synthetic: FXN 3 reverse 9:69044711-69044734; SpCas9
gcacaagagtggtgcagctg

SEQ ID NO: 42755 - DNA, 19 bp, Artificial Sequence
  Synthetic: FXN 3 reverse 9:69044712-69044734; SpCas9
cacaagagtggtgcagctg

SEQ ID NO: 42756 - DNA, 18 bp, Artificial Sequence
  Synthetic: FXN 3 reverse 9:69044713-69044734; SpCas9
acaagagtggtgcagctg

SEQ ID NO: 42757 - DNA, 25 bp, Artificial Sequence
  Synthetic: FXN 3 reverse 9:69044708-69044736; SpCas9
cactggggcacaagagtggtgcagc

SEQ ID NO: 42758 - DNA, 24 bp, Artificial Sequence
  Synthetic: FXN 3 reverse 9:69044709-69044736; SpCas9
actggggcacaagagtggtgcagc

SEQ ID NO: 42759 - DNA, 23 bp, Artificial Sequence
  Synthetic: FXN 3 reverse 9:69044710-69044736; SpCas9
ctggggcacaagagtggtgcagc

SEQ ID NO: 42760 - DNA, 22 bp, Artificial Sequence
  Synthetic: FXN 3 reverse 9:69044711-69044736; SpCas9
tggggcacaagagtggtgcagc

SEQ ID NO: 42761 - DNA, 21 bp, Artificial Sequence
  Synthetic: FXN 3 reverse 9:69044712-69044736; SpCas9
ggggcacaagagtggtgcagc

SEQ ID NO: 42762 - DNA, 20 bp, Artificial Sequence
  Synthetic: FXN 3 reverse 9:69044713-69044736; SpCas9
gggcacaagagtggtgcagc

SEQ ID NO: 42763 - DNA, 19 bp, Artificial Sequence
  Synthetic: FXN 3 reverse 9:69044714-69044736; SpCas9
ggcacaagagtggtgcagc

SEQ ID NO: 42764 - DNA, 18 bp, Artificial Sequence
  Synthetic: FXN 3 reverse 9:69044715-69044736; SpCas9
gcacaagagtggtgcagc

SEQ ID NO: 42765 - DNA, 25 bp, Artificial Sequence
  Synthetic: FXN 3 forward 9:69044709-69044737; SpCas9
cagctgcaccactcttgtgccccag

SEQ ID NO: 42766 - DNA, 24 bp, Artificial Sequence
  Synthetic: FXN 3 forward 9:69044710-69044737; SpCas9
agctgcaccactcttgtgccccag

SEQ ID NO: 42767 - DNA, 23 bp, Artificial Sequence
  Synthetic: FXN 3 forward 9:69044711-69044737; SpCas9
gctgcaccactcttgtgccccag

SEQ ID NO: 42768 - DNA, 22 bp, Artificial Sequence
  Synthetic: FXN 3 forward 9:69044712-69044737; SpCas9
ctgcaccactcttgtgccccag

SEQ ID NO: 42769 - DNA, 21 bp, Artificial Sequence
  Synthetic: FXN 3 forward 9:69044713-69044737; SpCas9
tgcaccactcttgtgccccag

SEQ ID NO: 42770 - DNA, 20 bp, Artificial Sequence
  Synthetic: FXN 3 forward 9:69044714-69044737; SpCas9
gcaccactcttgtgccccag

SEQ ID NO: 42771 - DNA, 19 bp, Artificial Sequence
  Synthetic: FXN 3 forward 9:69044715-69044737; SpCas9
caccactcttgtgccccag

SEQ ID NO: 42772 - DNA, 18 bp, Artificial Sequence
  Synthetic: FXN 3 forward 9:69044716-69044737; SpCas9
accactcttgtgccccag

SEQ ID NO: 42773 - DNA, 25 bp, Artificial Sequence
  Synthetic: FXN 3 reverse 9:69044712-69044740; SpCas9
gagccactggggcacaagagtggtg

SEQ ID NO: 42774 - DNA, 24 bp, Artificial Sequence
  Synthetic: FXN 3 reverse 9:69044713-69044740; SpCas9
agccactggggcacaagagtggtg

SEQ ID NO: 42775 - DNA, 23 bp, Artificial Sequence
  Synthetic: FXN 3 reverse 9:69044714-69044740; SpCas9
gccactggggcacaagagtggtg

SEQ ID NO: 42776 - DNA, 22 bp, Artificial Sequence
  Synthetic: FXN 3 reverse 9:69044715-69044740; SpCas9
ccactggggcacaagagtggtg

SEQ ID NO: 42777 - DNA, 21 bp, Artificial Sequence
  Synthetic: FXN 3 reverse 9:69044716-69044740; SpCas9
cactggggcacaagagtggtg

SEQ ID NO: 42778 - DNA, 20 bp, Artificial Sequence
  Synthetic: FXN 3 reverse 9:69044717-69044740; SpCas9
actggggcacaagagtggtg

SEQ ID NO: 42779 - DNA, 19 bp, Artificial Sequence
  Synthetic: FXN 3 reverse 9:69044718-69044740; SpCas9
ctggggcacaagagtggtg

SEQ ID NO: 42780 - DNA, 18 bp, Artificial Sequence
  Synthetic: FXN 3 reverse 9:69044719-69044740; SpCas9
tggggcacaagagtggtg

SEQ ID NO: 42781 - DNA, 25 bp, Artificial Sequence
  Synthetic: FXN 3 reverse 9:69044717-69044745; SpCas9
gacaagagccactggggcacaagag

SEQ ID NO: 42782 - DNA, 24 bp, Artificial Sequence
  Synthetic: FXN 3 reverse 9:69044718-69044745; SpCas9
acaagagccactggggcacaagag

SEQ ID NO: 42783 - DNA, 23 bp, Artificial Sequence
  Synthetic: FXN 3 reverse 9:69044719-69044745; SpCas9
caagagccactggggcacaagag

SEQ ID NO: 42784 - DNA, 22 bp, Artificial Sequence
  Synthetic: FXN 3 reverse 9:69044720-69044745; SpCas9
aagagccactggggcacaagag

SEQ ID NO: 42785 - DNA, 21 bp, Artificial Sequence
  Synthetic: FXN 3 reverse 9:69044721-69044745; SpCas9
agagccactggggcacaagag

SEQ ID NO: 42786 - DNA, 20 bp, Artificial Sequence
  Synthetic: FXN 3 reverse 9:69044722-69044745; SpCas9
gagccactggggcacaagag

SEQ ID NO: 42787 - DNA, 19 bp, Artificial Sequence
  Synthetic: FXN 3 reverse 9:69044723-69044745; SpCas9
agccactggggcacaagag

SEQ ID NO: 42788 - DNA, 18 bp, Artificial Sequence
  Synthetic: FXN 3 reverse 9:69044724-69044745; SpCas9
gccactggggcacaagag

SEQ ID NO: 42789 - DNA, 25 bp, Artificial Sequence
  Synthetic: FXN 3 reverse 9:69044720-69044748; SpCas9
tcagacaagagccactggggcacaa

SEQ ID NO: 42790 - DNA, 24 bp, Artificial Sequence
  Synthetic: FXN 3 reverse 9:69044721-69044748; SpCas9
cagacaagagccactggggcacaa

SEQ ID NO: 42791 - DNA, 23 bp, Artificial Sequence
  Synthetic: FXN 3 reverse 9:69044722-69044748; SpCas9
agacaagagccactggggcacaa

SEQ ID NO: 42792 - DNA, 22 bp, Artificial Sequence
  Synthetic: FXN 3 reverse 9:69044723-69044748; SpCas9
gacaagagccactggggcacaa

SEQ ID NO: 42793 - DNA, 21 bp, Artificial Sequence
  Synthetic: FXN 3 reverse 9:69044724-69044748; SpCas9
acaagagccactggggcacaa

SEQ ID NO: 42794 - DNA, 20 bp, Artificial Sequence
  Synthetic: FXN 3 reverse 9:69044725-69044748; SpCas9
caagagccactggggcacaa

SEQ ID NO: 42795 - DNA, 19 bp, Artificial Sequence
  Synthetic: FXN 3 reverse 9:69044726-69044748; SpCas9
aagagccactggggcacaa

SEQ ID NO: 42796 - DNA, 18 bp, Artificial Sequence
  Synthetic: FXN 3 reverse 9:69044727-69044748; SpCas9
agagccactggggcacaa

SEQ ID NO: 42797 - DNA, 25 bp, Artificial Sequence
  Synthetic: FXN 3 reverse 9:69044722-69044750; SpCas9
aatcagacaagagccactggggcac

SEQ ID NO: 42798 - DNA, 24 bp, Artificial Sequence
  Synthetic: FXN 3 reverse 9:69044723-69044750; SpCas9
atcagacaagagccactggggcac

SEQ ID NO: 42799 - DNA, 23 bp, Artificial Sequence
  Synthetic: FXN 3 reverse 9:69044724-69044750; SpCas9
tcagacaagagccactggggcac

SEQ ID NO: 42800 - DNA, 22 bp, Artificial Sequence
  Synthetic: FXN 3 reverse 9:69044725-69044750; SpCas9
cagacaagagccactggggcac

SEQ ID NO: 42801 - DNA, 21 bp, Artificial Sequence
  Synthetic: FXN 3 reverse 9:69044726-69044750; SpCas9
agacaagagccactggggcac

SEQ ID NO: 42802 - DNA, 20 bp, Artificial Sequence
  Synthetic: FXN 3 reverse 9:69044727-69044750; SpCas9
gacaagagccactggggcac

SEQ ID NO: 42803 - DNA, 19 bp, Artificial Sequence
  Synthetic: FXN 3 reverse 9:69044728-69044750; SpCas9
acaagagccactggggcac

SEQ ID NO: 42804 - DNA, 18 bp, Artificial Sequence
  Synthetic: FXN 3 reverse 9:69044729-69044750; SpCas9
caagagccactggggcac

SEQ ID NO: 42805 - DNA, 25 bp, Artificial Sequence
  Synthetic: FXN 3 reverse 9:69044728-69044756; SpCas9
ggaaataatcagacaagagccactg

SEQ ID NO: 42806 - DNA, 24 bp, Artificial Sequence
  Synthetic: FXN 3 reverse 9:69044729-69044756; SpCas9
gaaataatcagacaagagccactg

SEQ ID NO: 42807 - DNA, 23 bp, Artificial Sequence
  Synthetic: FXN 3 reverse 9:69044730-69044756; SpCas9
aaataatcagacaagagccactg

SEQ ID NO: 42808 - DNA, 22 bp, Artificial Sequence
  Synthetic: FXN 3 reverse 9:69044731-69044756; SpCas9
aataatcagacaagagccactg

SEQ ID NO: 42809 - DNA, 21 bp, Artificial Sequence
  Synthetic: FXN 3 reverse 9:69044732-69044756; SpCas9
ataatcagacaagagccactg

SEQ ID NO: 42810 - DNA, 20 bp, Artificial Sequence
  Synthetic: FXN 3 reverse 9:69044733-69044756; SpCas9
taatcagacaagagccactg

SEQ ID NO: 42811 - DNA, 19 bp, Artificial Sequence
  Synthetic: FXN 3 reverse 9:69044734-69044756; SpCas9
aatcagacaagagccactg

SEQ ID NO: 42812 - DNA, 18 bp, Artificial Sequence
  Synthetic: FXN 3 reverse 9:69044735-69044756; SpCas9
atcagacaagagccactg

SEQ ID NO: 42813 - DNA, 25 bp, Artificial Sequence
  Synthetic: FXN 3 reverse 9:69044729-69044757; SpCas9
aggaaataatcagacaagagccact

SEQ ID NO: 42814 - DNA, 24 bp, Artificial Sequence
  Synthetic: FXN 3 reverse 9:69044730-69044757; SpCas9
ggaaataatcagacaagagccact

SEQ ID NO: 42815 - DNA, 23 bp, Artificial Sequence
  Synthetic: FXN 3 reverse 9:69044731-69044757; SpCas9
gaaataatcagacaagagccact

SEQ ID NO: 42816 - DNA, 22 bp, Artificial Sequence
  Synthetic: FXN 3 reverse 9:69044732-69044757; SpCas9
aaataatcagacaagagccact

SEQ ID NO: 42817 - DNA, 21 bp, Artificial Sequence
  Synthetic: FXN 3 reverse 9:69044733-69044757; SpCas9
aataatcagacaagagccact

SEQ ID NO: 42818 - DNA, 20 bp, Artificial Sequence
  Synthetic: FXN 3 reverse 9:69044734-69044757; SpCas9
ataatcagacaagagccact

SEQ ID NO: 42819 - DNA, 19 bp, Artificial Sequence
  Synthetic: FXN 3 reverse 9:69044735-69044757; SpCas9
taatcagacaagagccact

SEQ ID NO: 42820 - DNA, 18 bp, Artificial Sequence
  Synthetic: FXN 3 reverse 9:69044736-69044757; SpCas9
aatcagacaagagccact

SEQ ID NO: 42821 - DNA, 25 bp, Artificial Sequence
  Synthetic: FXN 3 reverse 9:69044730-69044758; SpCas9
aaggaaataatcagacaagagccac

SEQ ID NO: 42822 - DNA, 24 bp, Artificial Sequence
  Synthetic: FXN 3 reverse 9:69044731-69044758; SpCas9
aggaaataatcagacaagagccac

SEQ ID NO: 42823 - DNA, 23 bp, Artificial Sequence
  Synthetic: FXN 3 reverse 9:69044732-69044758; SpCas9
ggaaataatcagacaagagccac

SEQ ID NO: 42824 - DNA, 22 bp, Artificial Sequence
  Synthetic: FXN 3 reverse 9:69044733-69044758; SpCas9
gaaataatcagacaagagccac

SEQ ID NO: 42825 - DNA, 21 bp, Artificial Sequence
  Synthetic: FXN 3 reverse 9:69044734-69044758; SpCas9
aaataatcagacaagagccac

SEQ ID NO: 42826 - DNA, 20 bp, Artificial Sequence
  Synthetic: FXN 3 reverse 9:69044735-69044758; SpCas9
aataatcagacaagagccac

SEQ ID NO: 42827 - DNA, 19 bp, Artificial Sequence
  Synthetic: FXN 3 reverse 9:69044736-69044758; SpCas9
ataatcagacaagagccac

SEQ ID NO: 42828 - DNA, 18 bp, Artificial Sequence
  Synthetic: FXN 3 reverse 9:69044737-69044758; SpCas9
taatcagacaagagccac

SEQ ID NO: 42829 - DNA, 25 bp, Artificial Sequence
  Synthetic: FXN 3 reverse 9:69044737-69044765; SpCas9
ggagatgaaggaaataatcagacaa

SEQ ID NO: 42830 - DNA, 24 bp, Artificial Sequence
  Synthetic: FXN 3 reverse 9:69044738-69044765; SpCas9
gagatgaaggaaataatcagacaa

SEQ ID NO: 42831 - DNA, 23 bp, Artificial Sequence
  Synthetic: FXN 3 reverse 9:69044739-69044765; SpCas9
agatgaaggaaataatcagacaa

SEQ ID NO: 42832 - DNA, 22 bp, Artificial Sequence
  Synthetic: FXN 3 reverse 9:69044740-69044765; SpCas9
gatgaaggaaataatcagacaa

SEQ ID NO: 42833 - DNA, 21 bp, Artificial Sequence
  Synthetic: FXN 3 reverse 9:69044741-69044765; SpCas9
atgaaggaaataatcagacaa

SEQ ID NO: 42834 - DNA, 20 bp, Artificial Sequence
  Synthetic: FXN 3 reverse 9:69044742-69044765; SpCas9
tgaaggaaataatcagacaa

SEQ ID NO: 42835 - DNA, 19 bp, Artificial Sequence
  Synthetic: FXN 3 reverse 9:69044743-69044765; SpCas9
gaaggaaataatcagacaa

SEQ ID NO: 42836 - DNA, 18 bp, Artificial Sequence
  Synthetic: FXN 3 reverse 9:69044744-69044765; SpCas9
aaggaaataatcagacaa

SEQ ID NO: 42837 - DNA, 25 bp, Artificial Sequence
  Synthetic: FXN 3 reverse 9:69044739-69044767; SpCas9
ggggagatgaaggaaataatcagac

SEQ ID NO: 42838 - DNA, 24 bp, Artificial Sequence
  Synthetic: FXN 3 reverse 9:69044740-69044767; SpCas9
gggagatgaaggaaataatcagac

SEQ ID NO: 42839 - DNA, 23 bp, Artificial Sequence
  Synthetic: FXN 3 reverse 9:69044741-69044767; SpCas9
ggagatgaaggaaataatcagac

SEQ ID NO: 42840 - DNA, 22 bp, Artificial Sequence
  Synthetic: FXN 3 reverse 9:69044742-69044767; SpCas9
gagatgaaggaaataatcagac

SEQ ID NO: 42841 - DNA, 21 bp, Artificial Sequence
  Synthetic: FXN 3 reverse 9:69044743-69044767; SpCas9
agatgaaggaaataatcagac

SEQ ID NO: 42842 - DNA, 20 bp, Artificial Sequence
  Synthetic: FXN 3 reverse 9:69044744-69044767; SpCas9
gatgaaggaaataatcagac

SEQ ID NO: 42843 - DNA, 19 bp, Artificial Sequence
  Synthetic: FXN 3 reverse 9:69044745-69044767; SpCas9
atgaaggaaataatcagac

SEQ ID NO: 42844 - DNA, 18 bp, Artificial Sequence
  Synthetic: FXN 3 reverse 9:69044746-69044767; SpCas9
tgaaggaaataatcagac

SEQ ID NO: 42845 - DNA, 25 bp, Artificial Sequence
  Synthetic: FXN 3 forward 9:69044741-69044769; SpCas9
tgtctgattatttccttcatctccc

SEQ ID NO: 42846 - DNA, 24 bp, Artificial Sequence
  Synthetic: FXN 3 forward 9:69044742-69044769; SpCas9
gtctgattatttccttcatctccc

SEQ ID NO: 42847 - DNA, 23 bp, Artificial Sequence
  Synthetic: FXN 3 forward 9:69044743-69044769; SpCas9
tctgattatttccttcatctccc

SEQ ID NO: 42848 - DNA, 22 bp, Artificial Sequence
  Synthetic: FXN 3 forward 9:69044744-69044769; SpCas9
ctgattatttccttcatctccc

SEQ ID NO: 42849 - DNA, 21 bp, Artificial Sequence
  Synthetic: FXN 3 forward 9:69044745-69044769; SpCas9
tgattatttccttcatctccc

SEQ ID NO: 42850 - DNA, 20 bp, Artificial Sequence
  Synthetic: FXN 3 forward 9:69044746-69044769; SpCas9
gattatttccttcatctccc

SEQ ID NO: 42851 - DNA, 19 bp, Artificial Sequence
  Synthetic: FXN 3 forward 9:69044747-69044769; SpCas9
attatttccttcatctccc

SEQ ID NO: 42852 - DNA, 18 bp, Artificial Sequence
  Synthetic: FXN 3 forward 9:69044748-69044769; SpCas9
ttatttccttcatctccc

SEQ ID NO: 42853 - DNA, 25 bp, Artificial Sequence
  Synthetic: FXN 3 reverse 9:69044744-69044772; SpCas9
cagctggggagatgaaggaaataat

SEQ ID NO: 42854 - DNA, 24 bp, Artificial Sequence
  Synthetic: FXN 3 reverse 9:69044745-69044772; SpCas9
agctggggagatgaaggaaataat

SEQ ID NO: 42855 - DNA, 23 bp, Artificial Sequence
  Synthetic: FXN 3 reverse 9:69044746-69044772; SpCas9
gctggggagatgaaggaaataat

SEQ ID NO: 42856 - DNA, 22 bp, Artificial Sequence
  Synthetic: FXN 3 reverse 9:69044747-69044772; SpCas9
ctggggagatgaaggaaataat

SEQ ID NO: 42857 - DNA, 21 bp, Artificial Sequence
  Synthetic: FXN 3 reverse 9:69044748-69044772; SpCas9
tggggagatgaaggaaataat

SEQ ID NO: 42858 - DNA, 20 bp, Artificial Sequence
  Synthetic: FXN 3 reverse 9:69044749-69044772; SpCas9
ggggagatgaaggaaataat

SEQ ID NO: 42859 - DNA, 19 bp, Artificial Sequence
  Synthetic: FXN 3 reverse 9:69044750-69044772; SpCas9
gggagatgaaggaaataat

SEQ ID NO: 42860 - DNA, 18 bp, Artificial Sequence
  Synthetic: FXN 3 reverse 9:69044751-69044772; SpCas9
ggagatgaaggaaataat

SEQ ID NO: 42861 - DNA, 25 bp, Artificial Sequence
  Synthetic: FXN 3 forward 9:69044745-69044773; SpCas9
tgattatttccttcatctccccagc

SEQ ID NO: 42862 - DNA, 24 bp, Artificial Sequence
  Synthetic: FXN 3 forward 9:69044746-69044773; SpCas9
gattatttccttcatctccccagc

SEQ ID NO: 42863 - DNA, 23 bp, Artificial Sequence
  Synthetic: FXN 3 forward 9:69044747-69044773; SpCas9
attatttccttcatctccccagc

SEQ ID NO: 42864 - DNA, 22 bp, Artificial Sequence
  Synthetic: FXN 3 forward 9:69044748-69044773; SpCas9
ttatttccttcatctccccagc

SEQ ID NO: 42865 - DNA, 21 bp, Artificial Sequence
  Synthetic: FXN 3 forward 9:69044749-69044773; SpCas9
tatttccttcatctccccagc

SEQ ID NO: 42866 - DNA, 20 bp, Artificial Sequence
  Synthetic: FXN 3 forward 9:69044750-69044773; SpCas9
atttccttcatctccccagc

SEQ ID NO: 42867 - DNA, 19 bp, Artificial Sequence
  Synthetic: FXN 3 forward 9:69044751-69044773; SpCas9
tttccttcatctccccagc

SEQ ID NO: 42868 - DNA, 18 bp, Artificial Sequence
  Synthetic: FXN 3 forward 9:69044752-69044773; SpCas9
ttccttcatctccccagc

SEQ ID NO: 42869 - DNA, 25 bp, Artificial Sequence
  Synthetic: FXN 3 forward 9:69044749-69044777; SpCas9
tatttccttcatctccccagctggt

SEQ ID NO: 42870 - DNA, 24 bp, Artificial Sequence
  Synthetic: FXN 3 forward 9:69044750-69044777; SpCas9
atttccttcatctccccagctggt

SEQ ID NO: 42871 - DNA, 23 bp, Artificial Sequence
  Synthetic: FXN 3 forward 9:69044751-69044777; SpCas9
tttccttcatctccccagctggt

SEQ ID NO: 42872 - DNA, 22 bp, Artificial Sequence
  Synthetic: FXN 3 forward 9:69044752-69044777; SpCas9
ttccttcatctccccagctggt

SEQ ID NO: 42873 - DNA, 21 bp, Artificial Sequence
  Synthetic: FXN 3 forward 9:69044753-69044777; SpCas9
tccttcatctccccagctggt

SEQ ID NO: 42874 - DNA, 20 bp, Artificial Sequence
  Synthetic: FXN 3 forward 9:69044754-69044777; SpCas9
ccttcatctccccagctggt

SEQ ID NO: 42875 - DNA, 19 bp, Artificial Sequence
  Synthetic: FXN 3 forward 9:69044755-69044777; SpCas9
cttcatctccccagctggt

SEQ ID NO: 42876 - DNA, 18 bp, Artificial Sequence
  Synthetic: FXN 3 forward 9:69044756-69044777; SpCas9
ttcatctccccagctggt

SEQ ID NO: 42877 - DNA, 25 bp, Artificial Sequence
  Synthetic: FXN 3 forward 9:69044752-69044780; SpCas9
ttccttcatctccccagctggtcag

SEQ ID NO: 42878 - DNA, 24 bp, Artificial Sequence
  Synthetic: FXN 3 forward 9:69044753-69044780; SpCas9
tccttcatctccccagctggtcag

SEQ ID NO: 42879 - DNA, 23 bp, Artificial Sequence
  Synthetic: FXN 3 forward 9:69044754-69044780; SpCas9
ccttcatctccccagctggtcag

SEQ ID NO: 42880 - DNA, 22 bp, Artificial Sequence
  Synthetic: FXN 3 forward 9:69044755-69044780; SpCas9
cttcatctccccagctggtcag

SEQ ID NO: 42881 - DNA, 21 bp, Artificial Sequence
  Synthetic: FXN 3 forward 9:69044756-69044780; SpCas9
ttcatctccccagctggtcag

SEQ ID NO: 42882 - DNA, 20 bp, Artificial Sequence
  Synthetic: FXN 3 forward 9:69044757-69044780; SpCas9
tcatctccccagctggtcag

SEQ ID NO: 42883 - DNA, 19 bp, Artificial Sequence
  Synthetic: FXN 3 forward 9:69044758-69044780; SpCas9
catctccccagctggtcag

SEQ ID NO: 42884 - DNA, 18 bp, Artificial Sequence
  Synthetic: FXN 3 forward 9:69044759-69044780; SpCas9
atctccccagctggtcag

SEQ ID NO: 42885 - DNA, 25 bp, Artificial Sequence
  Synthetic: FXN 3 forward 9:69044754-69044782; SpCas9
ccttcatctccccagctggtcagca

SEQ ID NO: 42886 - DNA, 24 bp, Artificial Sequence
  Synthetic: FXN 3 forward 9:69044755-69044782; SpCas9
cttcatctccccagctggtcagca

SEQ ID NO: 42887 - DNA, 23 bp, Artificial Sequence
  Synthetic: FXN 3 forward 9:69044756-69044782; SpCas9
ttcatctccccagctggtcagca

SEQ ID NO: 42888 - DNA, 22 bp, Artificial Sequence
  Synthetic: FXN 3 forward 9:69044757-69044782; SpCas9
tcatctccccagctggtcagca

SEQ ID NO: 42889 - DNA, 21 bp, Artificial Sequence
  Synthetic: FXN 3 forward 9:69044758-69044782; SpCas9
catctccccagctggtcagca

SEQ ID NO: 42890 - DNA, 20 bp, Artificial Sequence
  Synthetic: FXN 3 forward 9:69044759-69044782; SpCas9
atctccccagctggtcagca

SEQ ID NO: 42891 - DNA, 19 bp, Artificial Sequence
  Synthetic: FXN 3 forward 9:69044760-69044782; SpCas9
tctccccagctggtcagca

SEQ ID NO: 42892 - DNA, 18 bp, Artificial Sequence
  Synthetic: FXN 3 forward 9:69044761-69044782; SpCas9
ctccccagctggtcagca

SEQ ID NO: 42893 - DNA, 25 bp, Artificial Sequence
  Synthetic: FXN 3 reverse 9:69044754-69044782; SpCas9
ctctgctgaccagctggggagatga

SEQ ID NO: 42894 - DNA, 24 bp, Artificial Sequence
  Synthetic: FXN 3 reverse 9:69044755-69044782; SpCas9
tctgctgaccagctggggagatga

SEQ ID NO: 42895 - DNA, 23 bp, Artificial Sequence
  Synthetic: FXN 3 reverse 9:69044756-69044782; SpCas9
ctgctgaccagctggggagatga

SEQ ID NO: 42896 - DNA, 22 bp, Artificial Sequence
  Synthetic: FXN 3 reverse 9:69044757-69044782; SpCas9
tgctgaccagctggggagatga

SEQ ID NO: 42897 - DNA, 21 bp, Artificial Sequence
  Synthetic: FXN 3 reverse 9:69044758-69044782; SpCas9
gctgaccagctggggagatga

SEQ ID NO: 42898 - DNA, 20 bp, Artificial Sequence
  Synthetic: FXN 3 reverse 9:69044759-69044782; SpCas9
ctgaccagctggggagatga

SEQ ID NO: 42899 - DNA, 19 bp, Artificial Sequence
  Synthetic: FXN 3 reverse 9:69044760-69044782; SpCas9
tgaccagctggggagatga

SEQ ID NO: 42900 - DNA, 18 bp, Artificial Sequence
  Synthetic: FXN 3 reverse 9:69044761-69044782; SpCas9
gaccagctggggagatga

SEQ ID NO: 42901 - DNA, 25 bp, Artificial Sequence
  Synthetic: FXN 3 reverse 9:69044755-69044783; SpCas9
gctctgctgaccagctggggagatg

SEQ ID NO: 42902 - DNA, 24 bp, Artificial Sequence
  Synthetic: FXN 3 reverse 9:69044756-69044783; SpCas9
ctctgctgaccagctggggagatg

SEQ ID NO: 42903 - DNA, 23 bp, Artificial Sequence
  Synthetic: FXN 3 reverse 9:69044757-69044783; SpCas9
tctgctgaccagctggggagatg

SEQ ID NO: 42904 - DNA, 22 bp, Artificial Sequence
  Synthetic: FXN 3 reverse 9:69044758-69044783; SpCas9
ctgctgaccagctggggagatg

SEQ ID NO: 42905 - DNA, 21 bp, Artificial Sequence
  Synthetic: FXN 3 reverse 9:69044759-69044783; SpCas9
tgctgaccagctggggagatg

SEQ ID NO: 42906 - DNA, 20 bp, Artificial Sequence
  Synthetic: FXN 3 reverse 9:69044760-69044783; SpCas9
gctgaccagctggggagatg

SEQ ID NO: 42907 - DNA, 19 bp, Artificial Sequence
  Synthetic: FXN 3 reverse 9:69044761-69044783; SpCas9
ctgaccagctggggagatg

SEQ ID NO: 42908 - DNA, 18 bp, Artificial Sequence
  Synthetic: FXN 3 reverse 9:69044762-69044783; SpCas9
tgaccagctggggagatg

SEQ ID NO: 42909 - DNA, 25 bp, Artificial Sequence
  Synthetic: FXN 3 forward 9:69044758-69044786; SpCas9
catctccccagctggtcagcagagc

SEQ ID NO: 42910 - DNA, 24 bp, Artificial Sequence
  Synthetic: FXN 3 forward 9:69044759-69044786; SpCas9
atctccccagctggtcagcagagc

SEQ ID NO: 42911 - DNA, 23 bp, Artificial Sequence
  Synthetic: FXN 3 forward 9:69044760-69044786; SpCas9
tctccccagctggtcagcagagc

SEQ ID NO: 42912 - DNA, 22 bp, Artificial Sequence
  Synthetic: FXN 3 forward 9:69044761-69044786; SpCas9
ctccccagctggtcagcagagc

SEQ ID NO: 42913 - DNA, 21 bp, Artificial Sequence
  Synthetic: FXN 3 forward 9:69044762-69044786; SpCas9
tccccagctggtcagcagagc

SEQ ID NO: 42914 - DNA, 20 bp, Artificial Sequence
  Synthetic: FXN 3 forward 9:69044763-69044786; SpCas9
ccccagctggtcagcagagc

SEQ ID NO: 42915 - DNA, 19 bp, Artificial Sequence
  Synthetic: FXN 3 forward 9:69044764-69044786; SpCas9
cccagctggtcagcagagc

SEQ ID NO: 42916 - DNA, 18 bp, Artificial Sequence
  Synthetic: FXN 3 forward 9:69044765-69044786; SpCas9
ccagctggtcagcagagc

SEQ ID NO: 42917 - DNA, 25 bp, Artificial Sequence
  Synthetic: FXN 3 forward 9:69044761-69044789; SpCas9
ctccccagctggtcagcagagctgg

SEQ ID NO: 42918 - DNA, 24 bp, Artificial Sequence
  Synthetic: FXN 3 forward 9:69044762-69044789; SpCas9
tccccagctggtcagcagagctgg

SEQ ID NO: 42919 - DNA, 23 bp, Artificial Sequence
  Synthetic: FXN 3 forward 9:69044763-69044789; SpCas9
ccccagctggtcagcagagctgg

SEQ ID NO: 42920 - DNA, 22 bp, Artificial Sequence
  Synthetic: FXN 3 forward 9:69044764-69044789; SpCas9
cccagctggtcagcagagctgg

SEQ ID NO: 42921 - DNA, 21 bp, Artificial Sequence
  Synthetic: FXN 3 forward 9:69044765-69044789; SpCas9
ccagctggtcagcagagctgg

SEQ ID NO: 42922 - DNA, 20 bp, Artificial Sequence
  Synthetic: FXN 3 forward 9:69044766-69044789; SpCas9
cagctggtcagcagagctgg

SEQ ID NO: 42923 - DNA, 19 bp, Artificial Sequence
  Synthetic: FXN 3 forward 9:69044767-69044789; SpCas9
agctggtcagcagagctgg

SEQ ID NO: 42924 - DNA, 18 bp, Artificial Sequence
  Synthetic: FXN 3 forward 9:69044768-69044789; SpCas9
gctggtcagcagagctgg

SEQ ID NO: 42925 - DNA, 25 bp, Artificial Sequence
  Synthetic: FXN 3 reverse 9:69044761-69044789; SpCas9
ccaccagctctgctgaccagctggg

SEQ ID NO: 42926 - DNA, 24 bp, Artificial Sequence
  Synthetic: FXN 3 reverse 9:69044762-69044789; SpCas9
caccagctctgctgaccagctggg

SEQ ID NO: 42927 - DNA, 23 bp, Artificial Sequence
  Synthetic: FXN 3 reverse 9:69044763-69044789; SpCas9
accagctctgctgaccagctggg

SEQ ID NO: 42928 - DNA, 22 bp, Artificial Sequence
  Synthetic: FXN 3 reverse 9:69044764-69044789; SpCas9
ccagctctgctgaccagctggg

SEQ ID NO: 42929 - DNA, 21 bp, Artificial Sequence
  Synthetic: FXN 3 reverse 9:69044765-69044789; SpCas9
cagctctgctgaccagctggg

SEQ ID NO: 42930 - DNA, 20 bp, Artificial Sequence
  Synthetic: FXN 3 reverse 9:69044766-69044789; SpCas9
agctctgctgaccagctggg

SEQ ID NO: 42931 - DNA, 19 bp, Artificial Sequence
  Synthetic: FXN 3 reverse 9:69044767-69044789; SpCas9
gctctgctgaccagctggg

SEQ ID NO: 42932 - DNA, 18 bp, Artificial Sequence
  Synthetic: FXN 3 reverse 9:69044768-69044789; SpCas9
ctctgctgaccagctggg

SEQ ID NO: 42933 - DNA, 25 bp, Artificial Sequence
  Synthetic: FXN 3 reverse 9:69044763-69044791; SpCas9
taccaccagctctgctgaccagctg

SEQ ID NO: 42934 - DNA, 24 bp, Artificial Sequence
  Synthetic: FXN 3 reverse 9:69044764-69044791; SpCas9
accaccagctctgctgaccagctg

SEQ ID NO: 42935 - DNA, 23 bp, Artificial Sequence
  Synthetic: FXN 3 reverse 9:69044765-69044791; SpCas9
ccaccagctctgctgaccagctg

SEQ ID NO: 42936 - DNA, 22 bp, Artificial Sequence
  Synthetic: FXN 3 reverse 9:69044766-69044791; SpCas9
caccagctctgctgaccagctg

SEQ ID NO: 42937 - DNA, 21 bp, Artificial Sequence
  Synthetic: FXN 3 reverse 9:69044767-69044791; SpCas9
accagctctgctgaccagctg

SEQ ID NO: 42938 - DNA, 20 bp, Artificial Sequence
  Synthetic: FXN 3 reverse 9:69044768-69044791; SpCas9
ccagctctgctgaccagctg

SEQ ID NO: 42939 - DNA, 19 bp, Artificial Sequence
  Synthetic: FXN 3 reverse 9:69044769-69044791; SpCas9
cagctctgctgaccagctg

SEQ ID NO: 42940 - DNA, 18 bp, Artificial Sequence
  Synthetic: FXN 3 reverse 9:69044770-69044791; SpCas9
agctctgctgaccagctg

SEQ ID NO: 42941 - DNA, 25 bp, Artificial Sequence
  Synthetic: FXN 3 reverse 9:69044764-69044792; SpCas9
ttaccaccagctctgctgaccagct

SEQ ID NO: 42942 - DNA, 24 bp, Artificial Sequence
  Synthetic: FXN 3 reverse 9:69044765-69044792; SpCas9
taccaccagctctgctgaccagct

SEQ ID NO: 42943 - DNA, 23 bp, Artificial Sequence
  Synthetic: FXN 3 reverse 9:69044766-69044792; SpCas9
accaccagctctgctgaccagct

SEQ ID NO: 42944 - DNA, 22 bp, Artificial Sequence
  Synthetic: FXN 3 reverse 9:69044767-69044792; SpCas9
ccaccagctctgctgaccagct

SEQ ID NO: 42945 - DNA, 21 bp, Artificial Sequence
  Synthetic: FXN 3 reverse 9:69044768-69044792; SpCas9
caccagctctgctgaccagct

SEQ ID NO: 42946 - DNA, 20 bp, Artificial Sequence
  Synthetic: FXN 3 reverse 9:69044769-69044792; SpCas9
accagctctgctgaccagct

SEQ ID NO: 42947 - DNA, 19 bp, Artificial Sequence
  Synthetic: FXN 3 reverse 9:69044770-69044792; SpCas9
ccagctctgctgaccagct

SEQ ID NO: 42948 - DNA, 18 bp, Artificial Sequence
  Synthetic: FXN 3 reverse 9:69044771-69044792; SpCas9
cagctctgctgaccagct

SEQ ID NO: 42949 - DNA, 25 bp, Artificial Sequence
  Synthetic: FXN 3 reverse 9:69044765-69044793; SpCas9
attaccaccagctctgctgaccagc

SEQ ID NO: 42950 - DNA, 24 bp, Artificial Sequence
  Synthetic: FXN 3 reverse 9:69044766-69044793; SpCas9
ttaccaccagctctgctgaccagc

SEQ ID NO: 42951 - DNA, 23 bp, Artificial Sequence
  Synthetic: FXN 3 reverse 9:69044767-69044793; SpCas9
taccaccagctctgctgaccagc

SEQ ID NO: 42952 - DNA, 22 bp, Artificial Sequence
  Synthetic: FXN 3 reverse 9:69044768-69044793; SpCas9
accaccagctctgctgaccagc

SEQ ID NO: 42953 - DNA, 21 bp, Artificial Sequence
  Synthetic: FXN 3 reverse 9:69044769-69044793; SpCas9
ccaccagctctgctgaccagc

SEQ ID NO: 42954 - DNA, 20 bp, Artificial Sequence
  Synthetic: FXN 3 reverse 9:69044770-69044793; SpCas9
caccagctctgctgaccagc

SEQ ID NO: 42955 - DNA, 19 bp, Artificial Sequence
  Synthetic: FXN 3 reverse 9:69044771-69044793; SpCas9
accagctctgctgaccagc

SEQ ID NO: 42956 - DNA, 18 bp, Artificial Sequence
  Synthetic: FXN 3 reverse 9:69044772-69044793; SpCas9
ccagctctgctgaccagc

SEQ ID NO: 42957 - DNA, 25 bp, Artificial Sequence
  Synthetic: FXN 3 reverse 9:69044769-69044797; SpCas9
gttgattaccaccagctctgctgac

SEQ ID NO: 42958 - DNA, 24 bp, Artificial Sequence
  Synthetic: FXN 3 reverse 9:69044770-69044797; SpCas9
ttgattaccaccagctctgctgac

SEQ ID NO: 42959 - DNA, 23 bp, Artificial Sequence
  Synthetic: FXN 3 reverse 9:69044771-69044797; SpCas9
tgattaccaccagctctgctgac

SEQ ID NO: 42960 - DNA, 22 bp, Artificial Sequence
  Synthetic: FXN 3 reverse 9:69044772-69044797; SpCas9
gattaccaccagctctgctgac

SEQ ID NO: 42961 - DNA, 21 bp, Artificial Sequence
  Synthetic: FXN 3 reverse 9:69044773-69044797; SpCas9
attaccaccagctctgctgac

SEQ ID NO: 42962 - DNA, 20 bp, Artificial Sequence
  Synthetic: FXN 3 reverse 9:69044774-69044797; SpCas9
ttaccaccagctctgctgac

SEQ ID NO: 42963 - DNA, 19 bp, Artificial Sequence
  Synthetic: FXN 3 reverse 9:69044775-69044797; SpCas9
taccaccagctctgctgac

SEQ ID NO: 42964 - DNA, 18 bp, Artificial Sequence
  Synthetic: FXN 3 reverse 9:69044776-69044797; SpCas9
accaccagctctgctgac

SEQ ID NO: 42965 - DNA, 25 bp, Artificial Sequence
  Synthetic: FXN 3 forward 9:69044773-69044801; SpCas9
tcagcagagctggtggtaatcaact

SEQ ID NO: 42966 - DNA, 24 bp, Artificial Sequence
  Synthetic: FXN 3 forward 9:69044774-69044801; SpCas9
cagcagagctggtggtaatcaact

SEQ ID NO: 42967 - DNA, 23 bp, Artificial Sequence
  Synthetic: FXN 3 forward 9:69044775-69044801; SpCas9
agcagagctggtggtaatcaact

SEQ ID NO: 42968 - DNA, 22 bp, Artificial Sequence
  Synthetic: FXN 3 forward 9:69044776-69044801; SpCas9
gcagagctggtggtaatcaact

SEQ ID NO: 42969 - DNA, 21 bp, Artificial Sequence
  Synthetic: FXN 3 forward 9:69044777-69044801; SpCas9
cagagctggtggtaatcaact

SEQ ID NO: 42970 - DNA, 20 bp, Artificial Sequence
  Synthetic: FXN 3 forward 9:69044778-69044801; SpCas9
agagctggtggtaatcaact

SEQ ID NO: 42971 - DNA, 19 bp, Artificial Sequence
  Synthetic: FXN 3 forward 9:69044779-69044801; SpCas9
gagctggtggtaatcaact

SEQ ID NO: 42972 - DNA, 18 bp, Artificial Sequence
  Synthetic: FXN 3 forward 9:69044780-69044801; SpCas9
agctggtggtaatcaact

SEQ ID NO: 42973 - DNA, 25 bp, Artificial Sequence
  Synthetic: FXN 3 reverse 9:69044782-69044810; SpCas9
tgacagggtctgagttgattaccac

SEQ ID NO: 42974 - DNA, 24 bp, Artificial Sequence
  Synthetic: FXN 3 reverse 9:69044783-69044810; SpCas9
gacagggtctgagttgattaccac

SEQ ID NO: 42975 - DNA, 23 bp, Artificial Sequence
  Synthetic: FXN 3 reverse 9:69044784-69044810; SpCas9
acagggtctgagttgattaccac

SEQ ID NO: 42976 - DNA, 22 bp, Artificial Sequence
  Synthetic: FXN 3 reverse 9:69044785-69044810; SpCas9
cagggtctgagttgattaccac

SEQ ID NO: 42977 - DNA, 21 bp, Artificial Sequence
  Synthetic: FXN 3 reverse 9:69044786-69044810; SpCas9
agggtctgagttgattaccac

SEQ ID NO: 42978 - DNA, 20 bp, Artificial Sequence
  Synthetic: FXN 3 reverse 9:69044787-69044810; SpCas9
gggtctgagttgattaccac

SEQ ID NO: 42979 - DNA, 19 bp, Artificial Sequence
  Synthetic: FXN 3 reverse 9:69044788-69044810; SpCas9
ggtctgagttgattaccac

SEQ ID NO: 42980 - DNA, 18 bp, Artificial Sequence
  Synthetic: FXN 3 reverse 9:69044789-69044810; SpCas9
gtctgagttgattaccac

SEQ ID NO: 42981 - DNA, 25 bp, Artificial Sequence
  Synthetic: FXN 3 forward 9:69044787-69044815; SpCas9
ggtaatcaactcagaccctgtcacc

SEQ ID NO: 42982 - DNA, 24 bp, Artificial Sequence
  Synthetic: FXN 3 forward 9:69044788-69044815; SpCas9
gtaatcaactcagaccctgtcacc

SEQ ID NO: 42983 - DNA, 23 bp, Artificial Sequence
  Synthetic: FXN 3 forward 9:69044789-69044815; SpCas9
taatcaactcagaccctgtcacc

SEQ ID NO: 42984 - DNA, 22 bp, Artificial Sequence
  Synthetic: FXN 3 forward 9:69044790-69044815; SpCas9
aatcaactcagaccctgtcacc

SEQ ID NO: 42985 - DNA, 21 bp, Artificial Sequence
  Synthetic: FXN 3 forward 9:69044791-69044815; SpCas9
atcaactcagaccctgtcacc

SEQ ID NO: 42986 - DNA, 20 bp, Artificial Sequence
  Synthetic: FXN 3 forward 9:69044792-69044815; SpCas9
tcaactcagaccctgtcacc

SEQ ID NO: 42987 - DNA, 19 bp, Artificial Sequence
  Synthetic: FXN 3 forward 9:69044793-69044815; SpCas9
caactcagaccctgtcacc

SEQ ID NO: 42988 - DNA, 18 bp, Artificial Sequence
  Synthetic: FXN 3 forward 9:69044794-69044815; SpCas9
aactcagaccctgtcacc

SEQ ID NO: 42989 - DNA, 25 bp, Artificial Sequence
  Synthetic: FXN 3 forward 9:69044795-69044823; SpCas9
actcagaccctgtcacctggatgtc

SEQ ID NO: 42990 - DNA, 24 bp, Artificial Sequence
  Synthetic: FXN 3 forward 9:69044796-69044823; SpCas9
ctcagaccctgtcacctggatgtc

SEQ ID NO: 42991 - DNA, 23 bp, Artificial Sequence
  Synthetic: FXN 3 forward 9:69044797-69044823; SpCas9
tcagaccctgtcacctggatgtc

SEQ ID NO: 42992 - DNA, 22 bp, Artificial Sequence
  Synthetic: FXN 3 forward 9:69044798-69044823; SpCas9
cagaccctgtcacctggatgtc

SEQ ID NO: 42993 - DNA, 21 bp, Artificial Sequence
  Synthetic: FXN 3 forward 9:69044799-69044823; SpCas9
agaccctgtcacctggatgtc

SEQ ID NO: 42994 - DNA, 20 bp, Artificial Sequence
  Synthetic: FXN 3 forward 9:69044800-69044823; SpCas9
gaccctgtcacctggatgtc

SEQ ID NO: 42995 - DNA, 19 bp, Artificial Sequence
  Synthetic: FXN 3 forward 9:69044801-69044823; SpCas9
accctgtcacctggatgtc

SEQ ID NO: 42996 - DNA, 18 bp, Artificial Sequence
  Synthetic: FXN 3 forward 9:69044802-69044823; SpCas9
ccctgtcacctggatgtc

SEQ ID NO: 42997 - DNA, 25 bp, Artificial Sequence
  Synthetic: FXN 3 reverse 9:69044796-69044824; SpCas9
gctggacatccaggtgacagggtct

SEQ ID NO: 42998 - DNA, 24 bp, Artificial Sequence
  Synthetic: FXN 3 reverse 9:69044797-69044824; SpCas9
ctggacatccaggtgacagggtct

SEQ ID NO: 42999 - DNA, 23 bp, Artificial Sequence
  Synthetic: FXN 3 reverse 9:69044798-69044824; SpCas9
tggacatccaggtgacagggtct

SEQ ID NO: 43000 - DNA, 22 bp, Artificial Sequence
  Synthetic: FXN 3 reverse 9:69044799-69044824; SpCas9
ggacatccaggtgacagggtct

SEQ ID NO: 43001 - DNA, 21 bp, Artificial Sequence
  Synthetic: FXN 3 reverse 9:69044800-69044824; SpCas9
gacatccaggtgacagggtct

SEQ ID NO: 43002 - DNA, 20 bp, Artificial Sequence
  Synthetic: FXN 3 reverse 9:69044801-69044824; SpCas9
acatccaggtgacagggtct

SEQ ID NO: 43003 - DNA, 19 bp, Artificial Sequence
  Synthetic: FXN 3 reverse 9:69044802-69044824; SpCas9
catccaggtgacagggtct

SEQ ID NO: 43004 - DNA, 18 bp, Artificial Sequence
  Synthetic: FXN 3 reverse 9:69044803-69044824; SpCas9
atccaggtgacagggtct

SEQ ID NO: 43005 - DNA, 25 bp, Artificial Sequence
  Synthetic: FXN 3 forward 9:69044798-69044826; SpCas9
cagaccctgtcacctggatgtccag

SEQ ID NO: 43006 - DNA, 24 bp, Artificial Sequence
  Synthetic: FXN 3 forward 9:69044799-69044826; SpCas9
agaccctgtcacctggatgtccag

SEQ ID NO: 43007 - DNA, 23 bp, Artificial Sequence
  Synthetic: FXN 3 forward 9:69044800-69044826; SpCas9
gaccctgtcacctggatgtccag

SEQ ID NO: 43008 - DNA, 22 bp, Artificial Sequence
  Synthetic: FXN 3 forward 9:69044801-69044826; SpCas9
accctgtcacctggatgtccag

SEQ ID NO: 43009 - DNA, 21 bp, Artificial Sequence
  Synthetic: FXN 3 forward 9:69044802-69044826; SpCas9
ccctgtcacctggatgtccag

SEQ ID NO: 43010 - DNA, 20 bp, Artificial Sequence
  Synthetic: FXN 3 forward 9:69044803-69044826; SpCas9
cctgtcacctggatgtccag

SEQ ID NO: 43011 - DNA, 19 bp, Artificial Sequence
  Synthetic: FXN 3 forward 9:69044804-69044826; SpCas9
ctgtcacctggatgtccag

SEQ ID NO: 43012 - DNA, 18 bp, Artificial Sequence
  Synthetic: FXN 3 forward 9:69044805-69044826; SpCas9
tgtcacctggatgtccag

SEQ ID NO: 43013 - DNA, 25 bp, Artificial Sequence
  Synthetic: FXN 3 forward 9:69044802-69044830; SpCas9
ccctgtcacctggatgtccagcagt

SEQ ID NO: 43014 - DNA, 24 bp, Artificial Sequence
  Synthetic: FXN 3 forward 9:69044803-69044830; SpCas9
cctgtcacctggatgtccagcagt

SEQ ID NO: 43015 - DNA, 23 bp, Artificial Sequence
  Synthetic: FXN 3 forward 9:69044804-69044830; SpCas9
ctgtcacctggatgtccagcagt

SEQ ID NO: 43016 - DNA, 22 bp, Artificial Sequence
  Synthetic: FXN 3 forward 9:69044805-69044830; SpCas9
tgtcacctggatgtccagcagt

SEQ ID NO: 43017 - DNA, 21 bp, Artificial Sequence
  Synthetic: FXN 3 forward 9:69044806-69044830; SpCas9
gtcacctggatgtccagcagt

SEQ ID NO: 43018 - DNA, 20 bp, Artificial Sequence
  Synthetic: FXN 3 forward 9:69044807-69044830; SpCas9
tcacctggatgtccagcagt

SEQ ID NO: 43019 - DNA, 19 bp, Artificial Sequence
  Synthetic: FXN 3 forward 9:69044808-69044830; SpCas9
cacctggatgtccagcagt

SEQ ID NO: 43020 - DNA, 18 bp, Artificial Sequence
  Synthetic: FXN 3 forward 9:69044809-69044830; SpCas9
acctggatgtccagcagt

SEQ ID NO: 43021 - DNA, 25 bp, Artificial Sequence
  Synthetic: FXN 3 reverse 9:69044802-69044830; SpCas9
ctaactgctggacatccaggtgaca

SEQ ID NO: 43022 - DNA, 24 bp, Artificial Sequence
  Synthetic: FXN 3 reverse 9:69044803-69044830; SpCas9
taactgctggacatccaggtgaca

SEQ ID NO: 43023 - DNA, 23 bp, Artificial Sequence
  Synthetic: FXN 3 reverse 9:69044804-69044830; SpCas9
aactgctggacatccaggtgaca

SEQ ID NO: 43024 - DNA, 22 bp, Artificial Sequence
  Synthetic: FXN 3 reverse 9:69044805-69044830; SpCas9
actgctggacatccaggtgaca

SEQ ID NO: 43025 - DNA, 21 bp, Artificial Sequence
  Synthetic: FXN 3 reverse 9:69044806-69044830; SpCas9
ctgctggacatccaggtgaca

SEQ ID NO: 43026 - DNA, 20 bp, Artificial Sequence
  Synthetic: FXN 3 reverse 9:69044807-69044830; SpCas9
tgctggacatccaggtgaca

SEQ ID NO: 43027 - DNA, 19 bp, Artificial Sequence
  Synthetic: FXN 3 reverse 9:69044808-69044830; SpCas9
gctggacatccaggtgaca

SEQ ID NO: 43028 - DNA, 18 bp, Artificial Sequence
  Synthetic: FXN 3 reverse 9:69044809-69044830; SpCas9
ctggacatccaggtgaca

SEQ ID NO: 43029 - DNA, 25 bp, Artificial Sequence
  Synthetic: FXN 3 forward 9:69044803-69044831; SpCas9
cctgtcacctggatgtccagcagtt

SEQ ID NO: 43030 - DNA, 24 bp, Artificial Sequence
  Synthetic: FXN 3 forward 9:69044804-69044831; SpCas9
ctgtcacctggatgtccagcagtt

SEQ ID NO: 43031 - DNA, 23 bp, Artificial Sequence
  Synthetic: FXN 3 forward 9:69044805-69044831; SpCas9
tgtcacctggatgtccagcagtt

SEQ ID NO: 43032 - DNA, 22 bp, Artificial Sequence
  Synthetic: FXN 3 forward 9:69044806-69044831; SpCas9
gtcacctggatgtccagcagtt

SEQ ID NO: 43033 - DNA, 21 bp, Artificial Sequence
  Synthetic: FXN 3 forward 9:69044807-69044831; SpCas9
tcacctggatgtccagcagtt

SEQ ID NO: 43034 - DNA, 20 bp, Artificial Sequence
  Synthetic: FXN 3 forward 9:69044808-69044831; SpCas9
cacctggatgtccagcagtt

SEQ ID NO: 43035 - DNA, 19 bp, Artificial Sequence
  Synthetic: FXN 3 forward 9:69044809-69044831; SpCas9
acctggatgtccagcagtt

SEQ ID NO: 43036 - DNA, 18 bp, Artificial Sequence
  Synthetic: FXN 3 forward 9:69044810-69044831; SpCas9
cctggatgtccagcagtt

SEQ ID NO: 43037 - DNA, 25 bp, Artificial Sequence
  Synthetic: FXN 3 reverse 9:69044803-69044831; SpCas9
cctaactgctggacatccaggtgac

SEQ ID NO: 43038 - DNA, 24 bp, Artificial Sequence
  Synthetic: FXN 3 reverse 9:69044804-69044831; SpCas9
ctaactgctggacatccaggtgac

SEQ ID NO: 43039 - DNA, 23 bp, Artificial Sequence
  Synthetic: FXN 3 reverse 9:69044805-69044831; SpCas9
taactgctggacatccaggtgac

SEQ ID NO: 43040 - DNA, 22 bp, Artificial Sequence
  Synthetic: FXN 3 reverse 9:69044806-69044831; SpCas9
aactgctggacatccaggtgac

SEQ ID NO: 43041 - DNA, 21 bp, Artificial Sequence
  Synthetic: FXN 3 reverse 9:69044807-69044831; SpCas9
actgctggacatccaggtgac

SEQ ID NO: 43042 - DNA, 20 bp, Artificial Sequence
  Synthetic: FXN 3 reverse 9:69044808-69044831; SpCas9
ctgctggacatccaggtgac

SEQ ID NO: 43043 - DNA, 19 bp, Artificial Sequence
  Synthetic: FXN 3 reverse 9:69044809-69044831; SpCas9
tgctggacatccaggtgac

SEQ ID NO: 43044 - DNA, 18 bp, Artificial Sequence
  Synthetic: FXN 3 reverse 9:69044810-69044831; SpCas9
gctggacatccaggtgac

SEQ ID NO: 43045 - DNA, 25 bp, Artificial Sequence
  Synthetic: FXN 3 forward 9:69044804-69044832; SpCas9
ctgtcacctggatgtccagcagtta

SEQ ID NO: 43046 - DNA, 24 bp, Artificial Sequence
  Synthetic: FXN 3 forward 9:69044805-69044832; SpCas9
tgtcacctggatgtccagcagtta

SEQ ID NO: 43047 - DNA, 23 bp, Artificial Sequence
  Synthetic: FXN 3 forward 9:69044806-69044832; SpCas9
gtcacctggatgtccagcagtta

SEQ ID NO: 43048 - DNA, 22 bp, Artificial Sequence
  Synthetic: FXN 3 forward 9:69044807-69044832; SpCas9
tcacctggatgtccagcagtta

SEQ ID NO: 43049 - DNA, 21 bp, Artificial Sequence
  Synthetic: FXN 3 forward 9:69044808-69044832; SpCas9
cacctggatgtccagcagtta

SEQ ID NO: 43050 - DNA, 20 bp, Artificial Sequence
  Synthetic: FXN 3 forward 9:69044809-69044832; SpCas9
acctggatgtccagcagtta

SEQ ID NO: 43051 - DNA, 19 bp, Artificial Sequence
  Synthetic: FXN 3 forward 9:69044810-69044832; SpCas9
cctggatgtccagcagtta

SEQ ID NO: 43052 - DNA, 18 bp, Artificial Sequence
  Synthetic: FXN 3 forward 9:69044811-69044832; SpCas9
ctggatgtccagcagtta

SEQ ID NO: 43053 - DNA, 25 bp, Artificial Sequence
  Synthetic: FXN 3 reverse 9:69044804-69044832; SpCas9
ccctaactgctggacatccaggtga

SEQ ID NO: 43054 - DNA, 24 bp, Artificial Sequence
  Synthetic: FXN 3 reverse 9:69044805-69044832; SpCas9
cctaactgctggacatccaggtga

SEQ ID NO: 43055 - DNA, 23 bp, Artificial Sequence
  Synthetic: FXN 3 reverse 9:69044806-69044832; SpCas9
ctaactgctggacatccaggtga

SEQ ID NO: 43056 - DNA, 22 bp, Artificial Sequence
  Synthetic: FXN 3 reverse 9:69044807-69044832; SpCas9
taactgctggacatccaggtga

SEQ ID NO: 43057 - DNA, 21 bp, Artificial Sequence
  Synthetic: FXN 3 reverse 9:69044808-69044832; SpCas9
aactgctggacatccaggtga

SEQ ID NO: 43058 - DNA, 20 bp, Artificial Sequence
  Synthetic: FXN 3 reverse 9:69044809-69044832; SpCas9
actgctggacatccaggtga

SEQ ID NO: 43059 - DNA, 19 bp, Artificial Sequence
  Synthetic: FXN 3 reverse 9:69044810-69044832; SpCas9
ctgctggacatccaggtga

SEQ ID NO: 43060 - DNA, 18 bp, Artificial Sequence
  Synthetic: FXN 3 reverse 9:69044811-69044832; SpCas9
tgctggacatccaggtga

SEQ ID NO: 43061 - DNA, 25 bp, Artificial Sequence
  Synthetic: FXN 3 reverse 9:69044810-69044838; SpCas9
tttagtccctaactgctggacatcc

SEQ ID NO: 43062 - DNA, 24 bp, Artificial Sequence
  Synthetic: FXN 3 reverse 9:69044811-69044838; SpCas9
ttagtccctaactgctggacatcc

SEQ ID NO: 43063 - DNA, 23 bp, Artificial Sequence
  Synthetic: FXN 3 reverse 9:69044812-69044838; SpCas9
tagtccctaactgctggacatcc

SEQ ID NO: 43064 - DNA, 22 bp, Artificial Sequence
  Synthetic: FXN 3 reverse 9:69044813-69044838; SpCas9
agtccctaactgctggacatcc

SEQ ID NO: 43065 - DNA, 21 bp, Artificial Sequence
  Synthetic: FXN 3 reverse 9:69044814-69044838; SpCas9
gtccctaactgctggacatcc

SEQ ID NO: 43066 - DNA, 20 bp, Artificial Sequence
  Synthetic: FXN 3 reverse 9:69044815-69044838; SpCas9
tccctaactgctggacatcc

SEQ ID NO: 43067 - DNA, 19 bp, Artificial Sequence
  Synthetic: FXN 3 reverse 9:69044816-69044838; SpCas9
ccctaactgctggacatcc

SEQ ID NO: 43068 - DNA, 18 bp, Artificial Sequence
  Synthetic: FXN 3 reverse 9:69044817-69044838; SpCas9
cctaactgctggacatcc

SEQ ID NO: 43069 - DNA, 25 bp, Artificial Sequence
  Synthetic: FXN 3 reverse 9:69044811-69044839; SpCas9
ttttagtccctaactgctggacatc

SEQ ID NO: 43070 - DNA, 24 bp, Artificial Sequence
  Synthetic: FXN 3 reverse 9:69044812-69044839; SpCas9
tttagtccctaactgctggacatc

SEQ ID NO: 43071 - DNA, 23 bp, Artificial Sequence
  Synthetic: FXN 3 reverse 9:69044813-69044839; SpCas9
ttagtccctaactgctggacatc

SEQ ID NO: 43072 - DNA, 22 bp, Artificial Sequence
  Synthetic: FXN 3 reverse 9:69044814-69044839; SpCas9
tagtccctaactgctggacatc

SEQ ID NO: 43073 - DNA, 21 bp, Artificial Sequence
  Synthetic: FXN 3 reverse 9:69044815-69044839; SpCas9
agtccctaactgctggacatc

SEQ ID NO: 43074 - DNA, 20 bp, Artificial Sequence
  Synthetic: FXN 3 reverse 9:69044816-69044839; SpCas9
gtccctaactgctggacatc

SEQ ID NO: 43075 - DNA, 19 bp, Artificial Sequence
  Synthetic: FXN 3 reverse 9:69044817-69044839; SpCas9
tccctaactgctggacatc

SEQ ID NO: 43076 - DNA, 18 bp, Artificial Sequence
  Synthetic: FXN 3 reverse 9:69044818-69044839; SpCas9
ccctaactgctggacatc

SEQ ID NO: 43077 - DNA, 25 bp, Artificial Sequence
  Synthetic: FXN 3 reverse 9:69044819-69044847; SpCas9
ttgattttttttagtccctaactgc

SEQ ID NO: 43078 - DNA, 24 bp, Artificial Sequence
  Synthetic: FXN 3 reverse 9:69044820-69044847; SpCas9
tgattttttttagtccctaactgc

SEQ ID NO: 43079 - DNA, 23 bp, Artificial Sequence
  Synthetic: FXN 3 reverse 9:69044821-69044847; SpCas9
gattttttttagtccctaactgc

SEQ ID NO: 43080 - DNA, 22 bp, Artificial Sequence
  Synthetic: FXN 3 reverse 9:69044822-69044847; SpCas9
attttttttagtccctaactgc

SEQ ID NO: 43081 - DNA, 21 bp, Artificial Sequence
  Synthetic: FXN 3 reverse 9:69044823-69044847; SpCas9
ttttttttagtccctaactgc

SEQ ID NO: 43082 - DNA, 20 bp, Artificial Sequence
  Synthetic: FXN 3 reverse 9:69044824-69044847; SpCas9
tttttttagtccctaactgc

SEQ ID NO: 43083 - DNA, 19 bp, Artificial Sequence
  Synthetic: FXN 3 reverse 9:69044825-69044847; SpCas9
ttttttagtccctaactgc

SEQ ID NO: 43084 - DNA, 18 bp, Artificial Sequence
  Synthetic: FXN 3 reverse 9:69044826-69044847; SpCas9
tttttagtccctaactgc

SEQ ID NO: 43085 - DNA, 25 bp, Artificial Sequence
  Synthetic: FXN 3 forward 9:69044822-69044850; SpCas9
gcagttagggactaaaaaaaatcaa

SEQ ID NO: 43086 - DNA, 24 bp, Artificial Sequence
  Synthetic: FXN 3 forward 9:69044823-69044850; SpCas9
cagttagggactaaaaaaaatcaa

SEQ ID NO: 43087 - DNA, 23 bp, Artificial Sequence
  Synthetic: FXN 3 forward 9:69044824-69044850; SpCas9
agttagggactaaaaaaaatcaa

SEQ ID NO: 43088 - DNA, 22 bp, Artificial Sequence
  Synthetic: FXN 3 forward 9:69044825-69044850; SpCas9
gttagggactaaaaaaaatcaa

SEQ ID NO: 43089 - DNA, 21 bp, Artificial Sequence
  Synthetic: FXN 3 forward 9:69044826-69044850; SpCas9
ttagggactaaaaaaaatcaa

SEQ ID NO: 43090 - DNA, 20 bp, Artificial Sequence
  Synthetic: FXN 3 forward 9:69044827-69044850; SpCas9
tagggactaaaaaaaatcaa

SEQ ID NO: 43091 - DNA, 19 bp, Artificial Sequence
  Synthetic: FXN 3 forward 9:69044828-69044850; SpCas9
agggactaaaaaaaatcaa

SEQ ID NO: 43092 - DNA, 18 bp, Artificial Sequence
  Synthetic: FXN 3 forward 9:69044829-69044850; SpCas9
gggactaaaaaaaatcaa

SEQ ID NO: 43093 - DNA, 25 bp, Artificial Sequence
  Synthetic: FXN 3 forward 9:69044823-69044851; SpCas9
cagttagggactaaaaaaaatcaac

SEQ ID NO: 43094 - DNA, 24 bp, Artificial Sequence
  Synthetic: FXN 3 forward 9:69044824-69044851; SpCas9
agttagggactaaaaaaaatcaac

SEQ ID NO: 43095 - DNA, 23 bp, Artificial Sequence
  Synthetic: FXN 3 forward 9:69044825-69044851; SpCas9
gttagggactaaaaaaaatcaac

SEQ ID NO: 43096 - DNA, 22 bp, Artificial Sequence
  Synthetic: FXN 3 forward 9:69044826-69044851; SpCas9
ttagggactaaaaaaaatcaac

SEQ ID NO: 43097 - DNA, 21 bp, Artificial Sequence
  Synthetic: FXN 3 forward 9:69044827-69044851; SpCas9
tagggactaaaaaaaatcaac

SEQ ID NO: 43098 - DNA, 20 bp, Artificial Sequence
  Synthetic: FXN 3 forward 9:69044828-69044851; SpCas9
agggactaaaaaaaatcaac

SEQ ID NO: 43099 - DNA, 19 bp, Artificial Sequence
  Synthetic: FXN 3 forward 9:69044829-69044851; SpCas9
gggactaaaaaaaatcaac

SEQ ID NO: 43100 - DNA, 18 bp, Artificial Sequence
  Synthetic: FXN 3 forward 9:69044830-69044851; SpCas9
ggactaaaaaaaatcaac

SEQ ID NO: 43101 - DNA, 25 bp, Artificial Sequence
  Synthetic: FXN 3 reverse 9:69044833-69044861; SpCas9
cagaatgtgacctgttgattttttt

SEQ ID NO: 43102 - DNA, 24 bp, Artificial Sequence
  Synthetic: FXN 3 reverse 9:69044834-69044861; SpCas9
agaatgtgacctgttgattttttt

SEQ ID NO: 43103 - DNA, 23 bp, Artificial Sequence
  Synthetic: FXN 3 reverse 9:69044835-69044861; SpCas9
gaatgtgacctgttgattttttt

SEQ ID NO: 43104 - DNA, 22 bp, Artificial Sequence
  Synthetic: FXN 3 reverse 9:69044836-69044861; SpCas9
aatgtgacctgttgattttttt

SEQ ID NO: 43105 - DNA, 21 bp, Artificial Sequence
  Synthetic: FXN 3 reverse 9:69044837-69044861; SpCas9
atgtgacctgttgattttttt

SEQ ID NO: 43106 - DNA, 20 bp, Artificial Sequence
  Synthetic: FXN 3 reverse 9:69044838-69044861; SpCas9
tgtgacctgttgattttttt

SEQ ID NO: 43107 - DNA, 19 bp, Artificial Sequence
  Synthetic: FXN 3 reverse 9:69044839-69044861; SpCas9
gtgacctgttgattttttt

SEQ ID NO: 43108 - DNA, 18 bp, Artificial Sequence
  Synthetic: FXN 3 reverse 9:69044840-69044861; SpCas9
tgacctgttgattttttt

SEQ ID NO: 43109 - DNA, 25 bp, Artificial Sequence
  Synthetic: FXN 3 forward 9:69044841-69044869; SpCas9
aatcaacaggtcacattctgtcctg

SEQ ID NO: 43110 - DNA, 24 bp, Artificial Sequence
  Synthetic: FXN 3 forward 9:69044842-69044869; SpCas9
atcaacaggtcacattctgtcctg

SEQ ID NO: 43111 - DNA, 23 bp, Artificial Sequence
  Synthetic: FXN 3 forward 9:69044843-69044869; SpCas9
tcaacaggtcacattctgtcctg

SEQ ID NO: 43112 - DNA, 22 bp, Artificial Sequence
  Synthetic: FXN 3 forward 9:69044844-69044869; SpCas9
caacaggtcacattctgtcctg

SEQ ID NO: 43113 - DNA, 21 bp, Artificial Sequence
  Synthetic: FXN 3 forward 9:69044845-69044869; SpCas9
aacaggtcacattctgtcctg

SEQ ID NO: 43114 - DNA, 20 bp, Artificial Sequence
  Synthetic: FXN 3 forward 9:69044846-69044869; SpCas9
acaggtcacattctgtcctg

SEQ ID NO: 43115 - DNA, 19 bp, Artificial Sequence
  Synthetic: FXN 3 forward 9:69044847-69044869; SpCas9
caggtcacattctgtcctg

SEQ ID NO: 43116 - DNA, 18 bp, Artificial Sequence
  Synthetic: FXN 3 forward 9:69044848-69044869; SpCas9
aggtcacattctgtcctg

SEQ ID NO: 43117 - DNA, 25 bp, Artificial Sequence
  Synthetic: FXN 3 forward 9:69044855-69044883; SpCas9
attctgtcctgcagatcatgataat

SEQ ID NO: 43118 - DNA, 24 bp, Artificial Sequence
  Synthetic: FXN 3 forward 9:69044856-69044883; SpCas9
ttctgtcctgcagatcatgataat

SEQ ID NO: 43119 - DNA, 23 bp, Artificial Sequence
  Synthetic: FXN 3 forward 9:69044857-69044883; SpCas9
tctgtcctgcagatcatgataat

SEQ ID NO: 43120 - DNA, 22 bp, Artificial Sequence
  Synthetic: FXN 3 forward 9:69044858-69044883; SpCas9
ctgtcctgcagatcatgataat

SEQ ID NO: 43121 - DNA, 21 bp, Artificial Sequence
  Synthetic: FXN 3 forward 9:69044859-69044883; SpCas9
tgtcctgcagatcatgataat

SEQ ID NO: 43122 - DNA, 20 bp, Artificial Sequence
  Synthetic: FXN 3 forward 9:69044860-69044883; SpCas9
gtcctgcagatcatgataat

SEQ ID NO: 43123 - DNA, 19 bp, Artificial Sequence
  Synthetic: FXN 3 forward 9:69044861-69044883; SpCas9
tcctgcagatcatgataat

SEQ ID NO: 43124 - DNA, 18 bp, Artificial Sequence
  Synthetic: FXN 3 forward 9:69044862-69044883; SpCas9
cctgcagatcatgataat

SEQ ID NO: 43125 - DNA, 25 bp, Artificial Sequence
  Synthetic: FXN 3 reverse 9:69044858-69044886; SpCas9
gatcttattatcatgatctgcagga

SEQ ID NO: 43126 - DNA, 24 bp, Artificial Sequence
  Synthetic: FXN 3 reverse 9:69044859-69044886; SpCas9
atcttattatcatgatctgcagga

SEQ ID NO: 43127 - DNA, 23 bp, Artificial Sequence
  Synthetic: FXN 3 reverse 9:69044860-69044886; SpCas9
tcttattatcatgatctgcagga

SEQ ID NO: 43128 - DNA, 22 bp, Artificial Sequence
  Synthetic: FXN 3 reverse 9:69044861-69044886; SpCas9
cttattatcatgatctgcagga

SEQ ID NO: 43129 - DNA, 21 bp, Artificial Sequence
  Synthetic: FXN 3 reverse 9:69044862-69044886; SpCas9
ttattatcatgatctgcagga

SEQ ID NO: 43130 - DNA, 20 bp, Artificial Sequence
  Synthetic: FXN 3 reverse 9:69044863-69044886; SpCas9
tattatcatgatctgcagga

SEQ ID NO: 43131 - DNA, 19 bp, Artificial Sequence
  Synthetic: FXN 3 reverse 9:69044864-69044886; SpCas9
attatcatgatctgcagga

SEQ ID NO: 43132 - DNA, 18 bp, Artificial Sequence
  Synthetic: FXN 3 reverse 9:69044865-69044886; SpCas9
ttatcatgatctgcagga

SEQ ID NO: 43133 - DNA, 25 bp, Artificial Sequence
  Synthetic: FXN 3 reverse 9:69044862-69044890; SpCas9
gacagatcttattatcatgatctgc

SEQ ID NO: 43134 - DNA, 24 bp, Artificial Sequence
  Synthetic: FXN 3 reverse 9:69044863-69044890; SpCas9
acagatcttattatcatgatctgc

SEQ ID NO: 43135 - DNA, 23 bp, Artificial Sequence
  Synthetic: FXN 3 reverse 9:69044864-69044890; SpCas9
cagatcttattatcatgatctgc

SEQ ID NO: 43136 - DNA, 22 bp, Artificial Sequence
  Synthetic: FXN 3 reverse 9:69044865-69044890; SpCas9
agatcttattatcatgatctgc

SEQ ID NO: 43137 - DNA, 21 bp, Artificial Sequence
  Synthetic: FXN 3 reverse 9:69044866-69044890; SpCas9
gatcttattatcatgatctgc

SEQ ID NO: 43138 - DNA, 20 bp, Artificial Sequence
  Synthetic: FXN 3 reverse 9:69044867-69044890; SpCas9
atcttattatcatgatctgc

SEQ ID NO: 43139 - DNA, 19 bp, Artificial Sequence
  Synthetic: FXN 3 reverse 9:69044868-69044890; SpCas9
tcttattatcatgatctgc

SEQ ID NO: 43140 - DNA, 18 bp, Artificial Sequence
  Synthetic: FXN 3 reverse 9:69044869-69044890; SpCas9
cttattatcatgatctgc

SEQ ID NO: 43141 - DNA, 25 bp, Artificial Sequence
  Synthetic: FXN 3 reverse 9:69044863-69044891; SpCas9
tgacagatcttattatcatgatctg

SEQ ID NO: 43142 - DNA, 24 bp, Artificial Sequence
  Synthetic: FXN 3 reverse 9:69044864-69044891; SpCas9
gacagatcttattatcatgatctg

SEQ ID NO: 43143 - DNA, 23 bp, Artificial Sequence
  Synthetic: FXN 3 reverse 9:69044865-69044891; SpCas9
acagatcttattatcatgatctg

SEQ ID NO: 43144 - DNA, 22 bp, Artificial Sequence
  Synthetic: FXN 3 reverse 9:69044866-69044891; SpCas9
cagatcttattatcatgatctg

SEQ ID NO: 43145 - DNA, 21 bp, Artificial Sequence
  Synthetic: FXN 3 reverse 9:69044867-69044891; SpCas9
agatcttattatcatgatctg

SEQ ID NO: 43146 - DNA, 20 bp, Artificial Sequence
  Synthetic: FXN 3 reverse 9:69044868-69044891; SpCas9
gatcttattatcatgatctg

SEQ ID NO: 43147 - DNA, 19 bp, Artificial Sequence
  Synthetic: FXN 3 reverse 9:69044869-69044891; SpCas9
atcttattatcatgatctg

SEQ ID NO: 43148 - DNA, 18 bp, Artificial Sequence
  Synthetic: FXN 3 reverse 9:69044870-69044891; SpCas9
tcttattatcatgatctg

SEQ ID NO: 43149 - DNA, 25 bp, Artificial Sequence
  Synthetic: FXN 3 forward 9:69044864-69044892; SpCas9
tgcagatcatgataataagatctgt

SEQ ID NO: 43150 - DNA, 24 bp, Artificial Sequence
  Synthetic: FXN 3 forward 9:69044865-69044892; SpCas9
gcagatcatgataataagatctgt

SEQ ID NO: 43151 - DNA, 23 bp, Artificial Sequence
  Synthetic: FXN 3 forward 9:69044866-69044892; SpCas9
cagatcatgataataagatctgt

SEQ ID NO: 43152 - DNA, 22 bp, Artificial Sequence
  Synthetic: FXN 3 forward 9:69044867-69044892; SpCas9
agatcatgataataagatctgt

SEQ ID NO: 43153 - DNA, 21 bp, Artificial Sequence
  Synthetic: FXN 3 forward 9:69044868-69044892; SpCas9
gatcatgataataagatctgt

SEQ ID NO: 43154 - DNA, 20 bp, Artificial Sequence
  Synthetic: FXN 3 forward 9:69044869-69044892; SpCas9
atcatgataataagatctgt

SEQ ID NO: 43155 - DNA, 19 bp, Artificial Sequence
  Synthetic: FXN 3 forward 9:69044870-69044892; SpCas9
tcatgataataagatctgt

SEQ ID NO: 43156 - DNA, 18 bp, Artificial Sequence
  Synthetic: FXN 3 forward 9:69044871-69044892; SpCas9
catgataataagatctgt

SEQ ID NO: 43157 - DNA, 25 bp, Artificial Sequence
  Synthetic: FXN 3 forward 9:69044868-69044896; SpCas9
gatcatgataataagatctgtcaga

SEQ ID NO: 43158 - DNA, 24 bp, Artificial Sequence
  Synthetic: FXN 3 forward 9:69044869-69044896; SpCas9
atcatgataataagatctgtcaga

SEQ ID NO: 43159 - DNA, 23 bp, Artificial Sequence
  Synthetic: FXN 3 forward 9:69044870-69044896; SpCas9
tcatgataataagatctgtcaga

SEQ ID NO: 43160 - DNA, 22 bp, Artificial Sequence
  Synthetic: FXN 3 forward 9:69044871-69044896; SpCas9
catgataataagatctgtcaga

SEQ ID NO: 43161 - DNA, 21 bp, Artificial Sequence
  Synthetic: FXN 3 forward 9:69044872-69044896; SpCas9
atgataataagatctgtcaga

SEQ ID NO: 43162 - DNA, 20 bp, Artificial Sequence
  Synthetic: FXN 3 forward 9:69044873-69044896; SpCas9
tgataataagatctgtcaga

SEQ ID NO: 43163 - DNA, 19 bp, Artificial Sequence
  Synthetic: FXN 3 forward 9:69044874-69044896; SpCas9
gataataagatctgtcaga

SEQ ID NO: 43164 - DNA, 18 bp, Artificial Sequence
  Synthetic: FXN 3 forward 9:69044875-69044896; SpCas9
ataataagatctgtcaga

SEQ ID NO: 43165 - DNA, 25 bp, Artificial Sequence
  Synthetic: FXN 3 forward 9:69044871-69044899; SpCas9
catgataataagatctgtcagacag

SEQ ID NO: 43166 - DNA, 24 bp, Artificial Sequence
  Synthetic: FXN 3 forward 9:69044872-69044899; SpCas9
atgataataagatctgtcagacag

SEQ ID NO: 43167 - DNA, 23 bp, Artificial Sequence
  Synthetic: FXN 3 forward 9:69044873-69044899; SpCas9
tgataataagatctgtcagacag

SEQ ID NO: 43168 - DNA, 22 bp, Artificial Sequence
  Synthetic: FXN 3 forward 9:69044874-69044899; SpCas9
gataataagatctgtcagacag

SEQ ID NO: 43169 - DNA, 21 bp, Artificial Sequence
  Synthetic: FXN 3 forward 9:69044875-69044899; SpCas9
ataataagatctgtcagacag

SEQ ID NO: 43170 - DNA, 20 bp, Artificial Sequence
  Synthetic: FXN 3 forward 9:69044876-69044899; SpCas9
taataagatctgtcagacag

SEQ ID NO: 43171 - DNA, 19 bp, Artificial Sequence
  Synthetic: FXN 3 forward 9:69044877-69044899; SpCas9
aataagatctgtcagacag

SEQ ID NO: 43172 - DNA, 18 bp, Artificial Sequence
  Synthetic: FXN 3 forward 9:69044878-69044899; SpCas9
ataagatctgtcagacag

SEQ ID NO: 43173 - DNA, 25 bp, Artificial Sequence
  Synthetic: FXN 3 forward 9:69044875-69044903; SpCas9
ataataagatctgtcagacagcagt

SEQ ID NO: 43174 - DNA, 24 bp, Artificial Sequence
  Synthetic: FXN 3 forward 9:69044876-69044903; SpCas9
taataagatctgtcagacagcagt

SEQ ID NO: 43175 - DNA, 23 bp, Artificial Sequence
  Synthetic: FXN 3 forward 9:69044877-69044903; SpCas9
aataagatctgtcagacagcagt

SEQ ID NO: 43176 - DNA, 22 bp, Artificial Sequence
  Synthetic: FXN 3 forward 9:69044878-69044903; SpCas9
ataagatctgtcagacagcagt

SEQ ID NO: 43177 - DNA, 21 bp, Artificial Sequence
  Synthetic: FXN 3 forward 9:69044879-69044903; SpCas9
taagatctgtcagacagcagt

SEQ ID NO: 43178 - DNA, 20 bp, Artificial Sequence
  Synthetic: FXN 3 forward 9:69044880-69044903; SpCas9
aagatctgtcagacagcagt

SEQ ID NO: 43179 - DNA, 19 bp, Artificial Sequence
  Synthetic: FXN 3 forward 9:69044881-69044903; SpCas9
agatctgtcagacagcagt

SEQ ID NO: 43180 - DNA, 18 bp, Artificial Sequence
  Synthetic: FXN 3 forward 9:69044882-69044903; SpCas9
gatctgtcagacagcagt

SEQ ID NO: 43181 - DNA, 25 bp, Artificial Sequence
  Synthetic: FXN 3 forward 9:69044878-69044906; SpCas9
ataagatctgtcagacagcagtcag

SEQ ID NO: 43182 - DNA, 24 bp, Artificial Sequence
  Synthetic: FXN 3 forward 9:69044879-69044906; SpCas9
taagatctgtcagacagcagtcag

SEQ ID NO: 43183 - DNA, 23 bp, Artificial Sequence
  Synthetic: FXN 3 forward 9:69044880-69044906; SpCas9
aagatctgtcagacagcagtcag

SEQ ID NO: 43184 - DNA, 22 bp, Artificial Sequence
  Synthetic: FXN 3 forward 9:69044881-69044906; SpCas9
agatctgtcagacagcagtcag

SEQ ID NO: 43185 - DNA, 21 bp, Artificial Sequence
  Synthetic: FXN 3 forward 9:69044882-69044906; SpCas9
gatctgtcagacagcagtcag

SEQ ID NO: 43186 - DNA, 20 bp, Artificial Sequence
  Synthetic: FXN 3 forward 9:69044883-69044906; SpCas9
atctgtcagacagcagtcag

SEQ ID NO: 43187 - DNA, 19 bp, Artificial Sequence
  Synthetic: FXN 3 forward 9:69044884-69044906; SpCas9
tctgtcagacagcagtcag

SEQ ID NO: 43188 - DNA, 18 bp, Artificial Sequence
  Synthetic: FXN 3 forward 9:69044885-69044906; SpCas9
ctgtcagacagcagtcag

SEQ ID NO: 43189 - DNA, 25 bp, Artificial Sequence
  Synthetic: FXN 3 forward 9:69044882-69044910; SpCas9
gatctgtcagacagcagtcagcagt

SEQ ID NO: 43190 - DNA, 24 bp, Artificial Sequence
  Synthetic: FXN 3 forward 9:69044883-69044910; SpCas9
atctgtcagacagcagtcagcagt

SEQ ID NO: 43191 - DNA, 23 bp, Artificial Sequence
  Synthetic: FXN 3 forward 9:69044884-69044910; SpCas9
tctgtcagacagcagtcagcagt

SEQ ID NO: 43192 - DNA, 22 bp, Artificial Sequence
  Synthetic: FXN 3 forward 9:69044885-69044910; SpCas9
ctgtcagacagcagtcagcagt

SEQ ID NO: 43193 - DNA, 21 bp, Artificial Sequence
  Synthetic: FXN 3 forward 9:69044886-69044910; SpCas9
tgtcagacagcagtcagcagt

SEQ ID NO: 43194 - DNA, 20 bp, Artificial Sequence
  Synthetic: FXN 3 forward 9:69044887-69044910; SpCas9
gtcagacagcagtcagcagt

SEQ ID NO: 43195 - DNA, 19 bp, Artificial Sequence
  Synthetic: FXN 3 forward 9:69044888-69044910; SpCas9
tcagacagcagtcagcagt

SEQ ID NO: 43196 - DNA, 18 bp, Artificial Sequence
  Synthetic: FXN 3 forward 9:69044889-69044910; SpCas9
cagacagcagtcagcagt

SEQ ID NO: 43197 - DNA, 25 bp, Artificial Sequence
  Synthetic: FXN 3 forward 9:69044884-69044912; SpCas9
tctgtcagacagcagtcagcagtca

SEQ ID NO: 43198 - DNA, 24 bp, Artificial Sequence
  Synthetic: FXN 3 forward 9:69044885-69044912; SpCas9
ctgtcagacagcagtcagcagtca

SEQ ID NO: 43199 - DNA, 23 bp, Artificial Sequence
  Synthetic: FXN 3 forward 9:69044886-69044912; SpCas9
tgtcagacagcagtcagcagtca

SEQ ID NO: 43200 - DNA, 22 bp, Artificial Sequence
  Synthetic: FXN 3 forward 9:69044887-69044912; SpCas9
gtcagacagcagtcagcagtca

SEQ ID NO: 43201 - DNA, 21 bp, Artificial Sequence
  Synthetic: FXN 3 forward 9:69044888-69044912; SpCas9
tcagacagcagtcagcagtca

SEQ ID NO: 43202 - DNA, 20 bp, Artificial Sequence
  Synthetic: FXN 3 forward 9:69044889-69044912; SpCas9
cagacagcagtcagcagtca

SEQ ID NO: 43203 - DNA, 19 bp, Artificial Sequence
  Synthetic: FXN 3 forward 9:69044890-69044912; SpCas9
agacagcagtcagcagtca

SEQ ID NO: 43204 - DNA, 18 bp, Artificial Sequence
  Synthetic: FXN 3 forward 9:69044891-69044912; SpCas9
gacagcagtcagcagtca

SEQ ID NO: 43205 - DNA, 25 bp, Artificial Sequence
  Synthetic: FXN 3 reverse 9:69044885-69044913; SpCas9
gctctgactgctgactgctgtctga

SEQ ID NO: 43206 - DNA, 24 bp, Artificial Sequence
  Synthetic: FXN 3 reverse 9:69044886-69044913; SpCas9
ctctgactgctgactgctgtctga

SEQ ID NO: 43207 - DNA, 23 bp, Artificial Sequence
  Synthetic: FXN 3 reverse 9:69044887-69044913; SpCas9
tctgactgctgactgctgtctga

SEQ ID NO: 43208 - DNA, 22 bp, Artificial Sequence
  Synthetic: FXN 3 reverse 9:69044888-69044913; SpCas9
ctgactgctgactgctgtctga

SEQ ID NO: 43209 - DNA, 21 bp, Artificial Sequence
  Synthetic: FXN 3 reverse 9:69044889-69044913; SpCas9
tgactgctgactgctgtctga

SEQ ID NO: 43210 - DNA, 20 bp, Artificial Sequence
  Synthetic: FXN 3 reverse 9:69044890-69044913; SpCas9
gactgctgactgctgtctga

SEQ ID NO: 43211 - DNA, 19 bp, Artificial Sequence
  Synthetic: FXN 3 reverse 9:69044891-69044913; SpCas9
actgctgactgctgtctga

SEQ ID NO: 43212 - DNA, 18 bp, Artificial Sequence
  Synthetic: FXN 3 reverse 9:69044892-69044913; SpCas9
ctgctgactgctgtctga

SEQ ID NO: 43213 - DNA, 25 bp, Artificial Sequence
  Synthetic: FXN 3 forward 9:69044897-69044925; SpCas9
agtcagcagtcagagccaaatcttc

SEQ ID NO: 43214 - DNA, 24 bp, Artificial Sequence
  Synthetic: FXN 3 forward 9:69044898-69044925; SpCas9
gtcagcagtcagagccaaatcttc

SEQ ID NO: 43215 - DNA, 23 bp, Artificial Sequence
  Synthetic: FXN 3 forward 9:69044899-69044925; SpCas9
tcagcagtcagagccaaatcttc

SEQ ID NO: 43216 - DNA, 22 bp, Artificial Sequence
  Synthetic: FXN 3 forward 9:69044900-69044925; SpCas9
cagcagtcagagccaaatcttc

SEQ ID NO: 43217 - DNA, 21 bp, Artificial Sequence
  Synthetic: FXN 3 forward 9:69044901-69044925; SpCas9
agcagtcagagccaaatcttc

SEQ ID NO: 43218 - DNA, 20 bp, Artificial Sequence
  Synthetic: FXN 3 forward 9:69044902-69044925; SpCas9
gcagtcagagccaaatcttc

SEQ ID NO: 43219 - DNA, 19 bp, Artificial Sequence
  Synthetic: FXN 3 forward 9:69044903-69044925; SpCas9
cagtcagagccaaatcttc

SEQ ID NO: 43220 - DNA, 18 bp, Artificial Sequence
  Synthetic: FXN 3 forward 9:69044904-69044925; SpCas9
agtcagagccaaatcttc

SEQ ID NO: 43221 - DNA, 25 bp, Artificial Sequence
  Synthetic: FXN 3 forward 9:69044904-69044932; SpCas9
agtcagagccaaatcttctggactt

SEQ ID NO: 43222 - DNA, 24 bp, Artificial Sequence
  Synthetic: FXN 3 forward 9:69044905-69044932; SpCas9
gtcagagccaaatcttctggactt

SEQ ID NO: 43223 - DNA, 23 bp, Artificial Sequence
  Synthetic: FXN 3 forward 9:69044906-69044932; SpCas9
tcagagccaaatcttctggactt

SEQ ID NO: 43224 - DNA, 22 bp, Artificial Sequence
  Synthetic: FXN 3 forward 9:69044907-69044932; SpCas9
cagagccaaatcttctggactt

SEQ ID NO: 43225 - DNA, 21 bp, Artificial Sequence
  Synthetic: FXN 3 forward 9:69044908-69044932; SpCas9
agagccaaatcttctggactt

SEQ ID NO: 43226 - DNA, 20 bp, Artificial Sequence
  Synthetic: FXN 3 forward 9:69044909-69044932; SpCas9
gagccaaatcttctggactt

SEQ ID NO: 43227 - DNA, 19 bp, Artificial Sequence
  Synthetic: FXN 3 forward 9:69044910-69044932; SpCas9
agccaaatcttctggactt

SEQ ID NO: 43228 - DNA, 18 bp, Artificial Sequence
  Synthetic: FXN 3 forward 9:69044911-69044932; SpCas9
gccaaatcttctggactt

SEQ ID NO: 43229 - DNA, 25 bp, Artificial Sequence
  Synthetic: FXN 3 forward 9:69044907-69044935; SpCas9
cagagccaaatcttctggacttcag

SEQ ID NO: 43230 - DNA, 24 bp, Artificial Sequence
  Synthetic: FXN 3 forward 9:69044908-69044935; SpCas9
agagccaaatcttctggacttcag

SEQ ID NO: 43231 - DNA, 23 bp, Artificial Sequence
  Synthetic: FXN 3 forward 9:69044909-69044935; SpCas9
gagccaaatcttctggacttcag

SEQ ID NO: 43232 - DNA, 22 bp, Artificial Sequence
  Synthetic: FXN 3 forward 9:69044910-69044935; SpCas9
agccaaatcttctggacttcag

SEQ ID NO: 43233 - DNA, 21 bp, Artificial Sequence
  Synthetic: FXN 3 forward 9:69044911-69044935; SpCas9
gccaaatcttctggacttcag

SEQ ID NO: 43234 - DNA, 20 bp, Artificial Sequence
  Synthetic: FXN 3 forward 9:69044912-69044935; SpCas9
ccaaatcttctggacttcag

SEQ ID NO: 43235 - DNA, 19 bp, Artificial Sequence
  Synthetic: FXN 3 forward 9:69044913-69044935; SpCas9
caaatcttctggacttcag

SEQ ID NO: 43236 - DNA, 18 bp, Artificial Sequence
  Synthetic: FXN 3 forward 9:69044914-69044935; SpCas9
aaatcttctggacttcag

SEQ ID NO: 43237 - DNA, 25 bp, Artificial Sequence
  Synthetic: FXN 3 forward 9:69044908-69044936; SpCas9
agagccaaatcttctggacttcagc

SEQ ID NO: 43238 - DNA, 24 bp, Artificial Sequence
  Synthetic: FXN 3 forward 9:69044909-69044936; SpCas9
gagccaaatcttctggacttcagc

SEQ ID NO: 43239 - DNA, 23 bp, Artificial Sequence
  Synthetic: FXN 3 forward 9:69044910-69044936; SpCas9
agccaaatcttctggacttcagc

SEQ ID NO: 43240 - DNA, 22 bp, Artificial Sequence
  Synthetic: FXN 3 forward 9:69044911-69044936; SpCas9
gccaaatcttctggacttcagc

SEQ ID NO: 43241 - DNA, 21 bp, Artificial Sequence
  Synthetic: FXN 3 forward 9:69044912-69044936; SpCas9
ccaaatcttctggacttcagc

SEQ ID NO: 43242 - DNA, 20 bp, Artificial Sequence
  Synthetic: FXN 3 forward 9:69044913-69044936; SpCas9
caaatcttctggacttcagc

SEQ ID NO: 43243 - DNA, 19 bp, Artificial Sequence
  Synthetic: FXN 3 forward 9:69044914-69044936; SpCas9
aaatcttctggacttcagc

SEQ ID NO: 43244 - DNA, 18 bp, Artificial Sequence
  Synthetic: FXN 3 forward 9:69044915-69044936; SpCas9
aatcttctggacttcagc

SEQ ID NO: 43245 - DNA, 25 bp, Artificial Sequence
  Synthetic: FXN 3 reverse 9:69044912-69044940; SpCas9
gaatcctgctgaagtccagaagatt

SEQ ID NO: 43246 - DNA, 24 bp, Artificial Sequence
  Synthetic: FXN 3 reverse 9:69044913-69044940; SpCas9
aatcctgctgaagtccagaagatt

SEQ ID NO: 43247 - DNA, 23 bp, Artificial Sequence
  Synthetic: FXN 3 reverse 9:69044914-69044940; SpCas9
atcctgctgaagtccagaagatt

SEQ ID NO: 43248 - DNA, 22 bp, Artificial Sequence
  Synthetic: FXN 3 reverse 9:69044915-69044940; SpCas9
tcctgctgaagtccagaagatt

SEQ ID NO: 43249 - DNA, 21 bp, Artificial Sequence
  Synthetic: FXN 3 reverse 9:69044916-69044940; SpCas9
cctgctgaagtccagaagatt

SEQ ID NO: 43250 - DNA, 20 bp, Artificial Sequence
  Synthetic: FXN 3 reverse 9:69044917-69044940; SpCas9
ctgctgaagtccagaagatt

SEQ ID NO: 43251 - DNA, 19 bp, Artificial Sequence
  Synthetic: FXN 3 reverse 9:69044918-69044940; SpCas9
tgctgaagtccagaagatt

SEQ ID NO: 43252 - DNA, 18 bp, Artificial Sequence
  Synthetic: FXN 3 reverse 9:69044919-69044940; SpCas9
gctgaagtccagaagatt

SEQ ID NO: 43253 - DNA, 25 bp, Artificial Sequence
  Synthetic: FXN 3 reverse 9:69044918-69044946; SpCas9
gaggcagaatcctgctgaagtccag

SEQ ID NO: 43254 - DNA, 24 bp, Artificial Sequence
  Synthetic: FXN 3 reverse 9:69044919-69044946; SpCas9
aggcagaatcctgctgaagtccag

SEQ ID NO: 43255 - DNA, 23 bp, Artificial Sequence
  Synthetic: FXN 3 reverse 9:69044920-69044946; SpCas9
ggcagaatcctgctgaagtccag

SEQ ID NO: 43256 - DNA, 22 bp, Artificial Sequence
  Synthetic: FXN 3 reverse 9:69044921-69044946; SpCas9
gcagaatcctgctgaagtccag

SEQ ID NO: 43257 - DNA, 21 bp, Artificial Sequence
  Synthetic: FXN 3 reverse 9:69044922-69044946; SpCas9
cagaatcctgctgaagtccag

SEQ ID NO: 43258 - DNA, 20 bp, Artificial Sequence
  Synthetic: FXN 3 reverse 9:69044923-69044946; SpCas9
agaatcctgctgaagtccag

SEQ ID NO: 43259 - DNA, 19 bp, Artificial Sequence
  Synthetic: FXN 3 reverse 9:69044924-69044946; SpCas9
gaatcctgctgaagtccag

SEQ ID NO: 43260 - DNA, 18 bp, Artificial Sequence
  Synthetic: FXN 3 reverse 9:69044925-69044946; SpCas9
aatcctgctgaagtccag

SEQ ID NO: 43261 - DNA, 25 bp, Artificial Sequence
  Synthetic: FXN 3 reverse 9:69044921-69044949; SpCas9
caagaggcagaatcctgctgaagtc

SEQ ID NO: 43262 - DNA, 24 bp, Artificial Sequence
  Synthetic: FXN 3 reverse 9:69044922-69044949; SpCas9
aagaggcagaatcctgctgaagtc

SEQ ID NO: 43263 - DNA, 23 bp, Artificial Sequence
  Synthetic: FXN 3 reverse 9:69044923-69044949; SpCas9
agaggcagaatcctgctgaagtc

SEQ ID NO: 43264 - DNA, 22 bp, Artificial Sequence
  Synthetic: FXN 3 reverse 9:69044924-69044949; SpCas9
gaggcagaatcctgctgaagtc

SEQ ID NO: 43265 - DNA, 21 bp, Artificial Sequence
  Synthetic: FXN 3 reverse 9:69044925-69044949; SpCas9
aggcagaatcctgctgaagtc

SEQ ID NO: 43266 - DNA, 20 bp, Artificial Sequence
  Synthetic: FXN 3 reverse 9:69044926-69044949; SpCas9
ggcagaatcctgctgaagtc

SEQ ID NO: 43267 - DNA, 19 bp, Artificial Sequence
  Synthetic: FXN 3 reverse 9:69044927-69044949; SpCas9
gcagaatcctgctgaagtc

SEQ ID NO: 43268 - DNA, 18 bp, Artificial Sequence
  Synthetic: FXN 3 reverse 9:69044928-69044949; SpCas9
cagaatcctgctgaagtc

SEQ ID NO: 43269 - DNA, 25 bp, Artificial Sequence
  Synthetic: FXN 3 reverse 9:69044926-69044954; SpCas9
aatagcaagaggcagaatcctgctg

SEQ ID NO: 43270 - DNA, 24 bp, Artificial Sequence
  Synthetic: FXN 3 reverse 9:69044927-69044954; SpCas9
atagcaagaggcagaatcctgctg

SEQ ID NO: 43271 - DNA, 23 bp, Artificial Sequence
  Synthetic: FXN 3 reverse 9:69044928-69044954; SpCas9
tagcaagaggcagaatcctgctg

SEQ ID NO: 43272 - DNA, 22 bp, Artificial Sequence
  Synthetic: FXN 3 reverse 9:69044929-69044954; SpCas9
agcaagaggcagaatcctgctg

SEQ ID NO: 43273 - DNA, 21 bp, Artificial Sequence
  Synthetic: FXN 3 reverse 9:69044930-69044954; SpCas9
gcaagaggcagaatcctgctg

SEQ ID NO: 43274 - DNA, 20 bp, Artificial Sequence
  Synthetic: FXN 3 reverse 9:69044931-69044954; SpCas9
caagaggcagaatcctgctg

SEQ ID NO: 43275 - DNA, 19 bp, Artificial Sequence
  Synthetic: FXN 3 reverse 9:69044932-69044954; SpCas9
aagaggcagaatcctgctg

SEQ ID NO: 43276 - DNA, 18 bp, Artificial Sequence
  Synthetic: FXN 3 reverse 9:69044933-69044954; SpCas9
agaggcagaatcctgctg

SEQ ID NO: 43277 - DNA, 25 bp, Artificial Sequence
  Synthetic: FXN 3 reverse 9:69044939-69044967; SpCas9
agaggcaacaggaaatagcaagagg

SEQ ID NO: 43278 - DNA, 24 bp, Artificial Sequence
  Synthetic: FXN 3 reverse 9:69044940-69044967; SpCas9
gaggcaacaggaaatagcaagagg

SEQ ID NO: 43279 - DNA, 23 bp, Artificial Sequence
  Synthetic: FXN 3 reverse 9:69044941-69044967; SpCas9
aggcaacaggaaatagcaagagg

SEQ ID NO: 43280 - DNA, 22 bp, Artificial Sequence
  Synthetic: FXN 3 reverse 9:69044942-69044967; SpCas9
ggcaacaggaaatagcaagagg

SEQ ID NO: 43281 - DNA, 21 bp, Artificial Sequence
  Synthetic: FXN 3 reverse 9:69044943-69044967; SpCas9
gcaacaggaaatagcaagagg

SEQ ID NO: 43282 - DNA, 20 bp, Artificial Sequence
  Synthetic: FXN 3 reverse 9:69044944-69044967; SpCas9
caacaggaaatagcaagagg

SEQ ID NO: 43283 - DNA, 19 bp, Artificial Sequence
  Synthetic: FXN 3 reverse 9:69044945-69044967; SpCas9
aacaggaaatagcaagagg

SEQ ID NO: 43284 - DNA, 18 bp, Artificial Sequence
  Synthetic: FXN 3 reverse 9:69044946-69044967; SpCas9
acaggaaatagcaagagg

SEQ ID NO: 43285 - DNA, 25 bp, Artificial Sequence
  Synthetic: FXN 3 reverse 9:69044942-69044970; SpCas9
aagagaggcaacaggaaatagcaag

SEQ ID NO: 43286 - DNA, 24 bp, Artificial Sequence
  Synthetic: FXN 3 reverse 9:69044943-69044970; SpCas9
agagaggcaacaggaaatagcaag

SEQ ID NO: 43287 - DNA, 23 bp, Artificial Sequence
  Synthetic: FXN 3 reverse 9:69044944-69044970; SpCas9
gagaggcaacaggaaatagcaag

SEQ ID NO: 43288 - DNA, 22 bp, Artificial Sequence
  Synthetic: FXN 3 reverse 9:69044945-69044970; SpCas9
agaggcaacaggaaatagcaag

SEQ ID NO: 43289 - DNA, 21 bp, Artificial Sequence
  Synthetic: FXN 3 reverse 9:69044946-69044970; SpCas9
gaggcaacaggaaatagcaag

SEQ ID NO: 43290 - DNA, 20 bp, Artificial Sequence
  Synthetic: FXN 3 reverse 9:69044947-69044970; SpCas9
aggcaacaggaaatagcaag

SEQ ID NO: 43291 - DNA, 19 bp, Artificial Sequence
  Synthetic: FXN 3 reverse 9:69044948-69044970; SpCas9
ggcaacaggaaatagcaag

SEQ ID NO: 43292 - DNA, 18 bp, Artificial Sequence
  Synthetic: FXN 3 reverse 9:69044949-69044970; SpCas9
gcaacaggaaatagcaag

SEQ ID NO: 43293 - DNA, 25 bp, Artificial Sequence
  Synthetic: FXN 3 reverse 9:69044943-69044971; SpCas9
taagagaggcaacaggaaatagcaa

SEQ ID NO: 43294 - DNA, 24 bp, Artificial Sequence
  Synthetic: FXN 3 reverse 9:69044944-69044971; SpCas9
aagagaggcaacaggaaatagcaa

SEQ ID NO: 43295 - DNA, 23 bp, Artificial Sequence
  Synthetic: FXN 3 reverse 9:69044945-69044971; SpCas9
agagaggcaacaggaaatagcaa

SEQ ID NO: 43296 - DNA, 22 bp, Artificial Sequence
  Synthetic: FXN 3 reverse 9:69044946-69044971; SpCas9
gagaggcaacaggaaatagcaa

SEQ ID NO: 43297 - DNA, 21 bp, Artificial Sequence
  Synthetic: FXN 3 reverse 9:69044947-69044971; SpCas9
agaggcaacaggaaatagcaa

SEQ ID NO: 43298 - DNA, 20 bp, Artificial Sequence
  Synthetic: FXN 3 reverse 9:69044948-69044971; SpCas9
gaggcaacaggaaatagcaa

SEQ ID NO: 43299 - DNA, 19 bp, Artificial Sequence
  Synthetic: FXN 3 reverse 9:69044949-69044971; SpCas9
aggcaacaggaaatagcaa

SEQ ID NO: 43300 - DNA, 18 bp, Artificial Sequence
  Synthetic: FXN 3 reverse 9:69044950-69044971; SpCas9
ggcaacaggaaatagcaa

SEQ ID NO: 43301 - DNA, 25 bp, Artificial Sequence
  Synthetic: FXN 3 forward 9:69044944-69044972; SpCas9
tcttgctatttcctgttgcctctct

SEQ ID NO: 43302 - DNA, 24 bp, Artificial Sequence
  Synthetic: FXN 3 forward 9:69044945-69044972; SpCas9
cttgctatttcctgttgcctctct

SEQ ID NO: 43303 - DNA, 23 bp, Artificial Sequence
  Synthetic: FXN 3 forward 9:69044946-69044972; SpCas9
ttgctatttcctgttgcctctct

SEQ ID NO: 43304 - DNA, 22 bp, Artificial Sequence
  Synthetic: FXN 3 forward 9:69044947-69044972; SpCas9
tgctatttcctgttgcctctct

SEQ ID NO: 43305 - DNA, 21 bp, Artificial Sequence
  Synthetic: FXN 3 forward 9:69044948-69044972; SpCas9
gctatttcctgttgcctctct

SEQ ID NO: 43306 - DNA, 20 bp, Artificial Sequence
  Synthetic: FXN 3 forward 9:69044949-69044972; SpCas9
ctatttcctgttgcctctct

SEQ ID NO: 43307 - DNA, 19 bp, Artificial Sequence
  Synthetic: FXN 3 forward 9:69044950-69044972; SpCas9
tatttcctgttgcctctct

SEQ ID NO: 43308 - DNA, 18 bp, Artificial Sequence
  Synthetic: FXN 3 forward 9:69044951-69044972; SpCas9
atttcctgttgcctctct

SEQ ID NO: 43309 - DNA, 25 bp, Artificial Sequence
  Synthetic: FXN 3 reverse 9:69044945-69044973; SpCas9
actaagagaggcaacaggaaatagc

SEQ ID NO: 43310 - DNA, 24 bp, Artificial Sequence
  Synthetic: FXN 3 reverse 9:69044946-69044973; SpCas9
ctaagagaggcaacaggaaatagc

SEQ ID NO: 43311 - DNA, 23 bp, Artificial Sequence
  Synthetic: FXN 3 reverse 9:69044947-69044973; SpCas9
taagagaggcaacaggaaatagc

SEQ ID NO: 43312 - DNA, 22 bp, Artificial Sequence
  Synthetic: FXN 3 reverse 9:69044948-69044973; SpCas9
aagagaggcaacaggaaatagc

SEQ ID NO: 43313 - DNA, 21 bp, Artificial Sequence
  Synthetic: FXN 3 reverse 9:69044949-69044973; SpCas9
agagaggcaacaggaaatagc

SEQ ID NO: 43314 - DNA, 20 bp, Artificial Sequence
  Synthetic: FXN 3 reverse 9:69044950-69044973; SpCas9
gagaggcaacaggaaatagc

SEQ ID NO: 43315 - DNA, 19 bp, Artificial Sequence
  Synthetic: FXN 3 reverse 9:69044951-69044973; SpCas9
agaggcaacaggaaatagc

SEQ ID NO: 43316 - DNA, 18 bp, Artificial Sequence
  Synthetic: FXN 3 reverse 9:69044952-69044973; SpCas9
gaggcaacaggaaatagc

SEQ ID NO: 43317 - DNA, 25 bp, Artificial Sequence
  Synthetic: FXN 3 reverse 9:69044949-69044977; SpCas9
ggtcactaagagaggcaacaggaaa

SEQ ID NO: 43318 - DNA, 24 bp, Artificial Sequence
  Synthetic: FXN 3 reverse 9:69044950-69044977; SpCas9
gtcactaagagaggcaacaggaaa

SEQ ID NO: 43319 - DNA, 23 bp, Artificial Sequence
  Synthetic: FXN 3 reverse 9:69044951-69044977; SpCas9
tcactaagagaggcaacaggaaa

SEQ ID NO: 43320 - DNA, 22 bp, Artificial Sequence
  Synthetic: FXN 3 reverse 9:69044952-69044977; SpCas9
cactaagagaggcaacaggaaa

SEQ ID NO: 43321 - DNA, 21 bp, Artificial Sequence
  Synthetic: FXN 3 reverse 9:69044953-69044977; SpCas9
actaagagaggcaacaggaaa

SEQ ID NO: 43322 - DNA, 20 bp, Artificial Sequence
  Synthetic: FXN 3 reverse 9:69044954-69044977; SpCas9
ctaagagaggcaacaggaaa

SEQ ID NO: 43323 - DNA, 19 bp, Artificial Sequence
  Synthetic: FXN 3 reverse 9:69044955-69044977; SpCas9
taagagaggcaacaggaaa

SEQ ID NO: 43324 - DNA, 18 bp, Artificial Sequence
  Synthetic: FXN 3 reverse 9:69044956-69044977; SpCas9
aagagaggcaacaggaaa

SEQ ID NO: 43325 - DNA, 25 bp, Artificial Sequence
  Synthetic: FXN 3 reverse 9:69044955-69044983; SpCas9
ttaaaaggtcactaagagaggcaac

SEQ ID NO: 43326 - DNA, 24 bp, Artificial Sequence
  Synthetic: FXN 3 reverse 9:69044956-69044983; SpCas9
taaaaggtcactaagagaggcaac

SEQ ID NO: 43327 - DNA, 23 bp, Artificial Sequence
  Synthetic: FXN 3 reverse 9:69044957-69044983; SpCas9
aaaaggtcactaagagaggcaac

SEQ ID NO: 43328 - DNA, 22 bp, Artificial Sequence
  Synthetic: FXN 3 reverse 9:69044958-69044983; SpCas9
aaaggtcactaagagaggcaac

SEQ ID NO: 43329 - DNA, 21 bp, Artificial Sequence
  Synthetic: FXN 3 reverse 9:69044959-69044983; SpCas9
aaggtcactaagagaggcaac

SEQ ID NO: 43330 - DNA, 20 bp, Artificial Sequence
  Synthetic: FXN 3 reverse 9:69044960-69044983; SpCas9
aggtcactaagagaggcaac

SEQ ID NO: 43331 - DNA, 19 bp, Artificial Sequence
  Synthetic: FXN 3 reverse 9:69044961-69044983; SpCas9
ggtcactaagagaggcaac

SEQ ID NO: 43332 - DNA, 18 bp, Artificial Sequence
  Synthetic: FXN 3 reverse 9:69044962-69044983; SpCas9
gtcactaagagaggcaac

SEQ ID NO: 43333 - DNA, 25 bp, Artificial Sequence
  Synthetic: FXN 3 forward 9:69044956-69044984; SpCas9
ctgttgcctctcttagtgacctttt

SEQ ID NO: 43334 - DNA, 24 bp, Artificial Sequence
  Synthetic: FXN 3 forward 9:69044957-69044984; SpCas9
tgttgcctctcttagtgacctttt

SEQ ID NO: 43335 - DNA, 23 bp, Artificial Sequence
  Synthetic: FXN 3 forward 9:69044958-69044984; SpCas9
gttgcctctcttagtgacctttt

SEQ ID NO: 43336 - DNA, 22 bp, Artificial Sequence
  Synthetic: FXN 3 forward 9:69044959-69044984; SpCas9
ttgcctctcttagtgacctttt

SEQ ID NO: 43337 - DNA, 21 bp, Artificial Sequence
  Synthetic: FXN 3 forward 9:69044960-69044984; SpCas9
tgcctctcttagtgacctttt

SEQ ID NO: 43338 - DNA, 20 bp, Artificial Sequence
  Synthetic: FXN 3 forward 9:69044961-69044984; SpCas9
gcctctcttagtgacctttt

SEQ ID NO: 43339 - DNA, 19 bp, Artificial Sequence
  Synthetic: FXN 3 forward 9:69044962-69044984; SpCas9
cctctcttagtgacctttt

SEQ ID NO: 43340 - DNA, 18 bp, Artificial Sequence
  Synthetic: FXN 3 forward 9:69044963-69044984; SpCas9
ctctcttagtgacctttt

SEQ ID NO: 43341 - DNA, 25 bp, Artificial Sequence
  Synthetic: FXN 3 reverse 9:69044956-69044984; SpCas9
cttaaaaggtcactaagagaggcaa

SEQ ID NO: 43342 - DNA, 24 bp, Artificial Sequence
  Synthetic: FXN 3 reverse 9:69044957-69044984; SpCas9
ttaaaaggtcactaagagaggcaa

SEQ ID NO: 43343 - DNA, 23 bp, Artificial Sequence
  Synthetic: FXN 3 reverse 9:69044958-69044984; SpCas9
taaaaggtcactaagagaggcaa

SEQ ID NO: 43344 - DNA, 22 bp, Artificial Sequence
  Synthetic: FXN 3 reverse 9:69044959-69044984; SpCas9
aaaaggtcactaagagaggcaa

SEQ ID NO: 43345 - DNA, 21 bp, Artificial Sequence
  Synthetic: FXN 3 reverse 9:69044960-69044984; SpCas9
aaaggtcactaagagaggcaa

SEQ ID NO: 43346 - DNA, 20 bp, Artificial Sequence
  Synthetic: FXN 3 reverse 9:69044961-69044984; SpCas9
aaggtcactaagagaggcaa

SEQ ID NO: 43347 - DNA, 19 bp, Artificial Sequence
  Synthetic: FXN 3 reverse 9:69044962-69044984; SpCas9
aggtcactaagagaggcaa

SEQ ID NO: 43348 - DNA, 18 bp, Artificial Sequence
  Synthetic: FXN 3 reverse 9:69044963-69044984; SpCas9
ggtcactaagagaggcaa

SEQ ID NO: 43349 - DNA, 25 bp, Artificial Sequence
  Synthetic: FXN 3 forward 9:69044958-69044986; SpCas9
gttgcctctcttagtgaccttttaa

SEQ ID NO: 43350 - DNA, 24 bp, Artificial Sequence
  Synthetic: FXN 3 forward 9:69044959-69044986; SpCas9
ttgcctctcttagtgaccttttaa

SEQ ID NO: 43351 - DNA, 23 bp, Artificial Sequence
  Synthetic: FXN 3 forward 9:69044960-69044986; SpCas9
tgcctctcttagtgaccttttaa

SEQ ID NO: 43352 - DNA, 22 bp, Artificial Sequence
  Synthetic: FXN 3 forward 9:69044961-69044986; SpCas9
gcctctcttagtgaccttttaa

SEQ ID NO: 43353 - DNA, 21 bp, Artificial Sequence
  Synthetic: FXN 3 forward 9:69044962-69044986; SpCas9
cctctcttagtgaccttttaa

SEQ ID NO: 43354 - DNA, 20 bp, Artificial Sequence
  Synthetic: FXN 3 forward 9:69044963-69044986; SpCas9
ctctcttagtgaccttttaa

SEQ ID NO: 43355 - DNA, 19 bp, Artificial Sequence
  Synthetic: FXN 3 forward 9:69044964-69044986; SpCas9
tctcttagtgaccttttaa

SEQ ID NO: 43356 - DNA, 18 bp, Artificial Sequence
  Synthetic: FXN 3 forward 9:69044965-69044986; SpCas9
ctcttagtgaccttttaa

SEQ ID NO: 43357 - DNA, 25 bp, Artificial Sequence
  Synthetic: FXN 3 reverse 9:69044962-69044990; SpCas9
aatgctcttaaaaggtcactaagag

SEQ ID NO: 43358 - DNA, 24 bp, Artificial Sequence
  Synthetic: FXN 3 reverse 9:69044963-69044990; SpCas9
atgctcttaaaaggtcactaagag

SEQ ID NO: 43359 - DNA, 23 bp, Artificial Sequence
  Synthetic: FXN 3 reverse 9:69044964-69044990; SpCas9
tgctcttaaaaggtcactaagag

SEQ ID NO: 43360 - DNA, 22 bp, Artificial Sequence
  Synthetic: FXN 3 reverse 9:69044965-69044990; SpCas9
gctcttaaaaggtcactaagag

SEQ ID NO: 43361 - DNA, 21 bp, Artificial Sequence
  Synthetic: FXN 3 reverse 9:69044966-69044990; SpCas9
ctcttaaaaggtcactaagag

SEQ ID NO: 43362 - DNA, 20 bp, Artificial Sequence
  Synthetic: FXN 3 reverse 9:69044967-69044990; SpCas9
tcttaaaaggtcactaagag

SEQ ID NO: 43363 - DNA, 19 bp, Artificial Sequence
  Synthetic: FXN 3 reverse 9:69044968-69044990; SpCas9
cttaaaaggtcactaagag

SEQ ID NO: 43364 - DNA, 18 bp, Artificial Sequence
  Synthetic: FXN 3 reverse 9:69044969-69044990; SpCas9
ttaaaaggtcactaagag

SEQ ID NO: 43365 - DNA, 25 bp, Artificial Sequence
  Synthetic: FXN 3 reverse 9:69044963-69044991; SpCas9
caatgctcttaaaaggtcactaaga

SEQ ID NO: 43366 - DNA, 24 bp, Artificial Sequence
  Synthetic: FXN 3 reverse 9:69044964-69044991; SpCas9
aatgctcttaaaaggtcactaaga

SEQ ID NO: 43367 - DNA, 23 bp, Artificial Sequence
  Synthetic: FXN 3 reverse 9:69044965-69044991; SpCas9
atgctcttaaaaggtcactaaga

SEQ ID NO: 43368 - DNA, 22 bp, Artificial Sequence
  Synthetic: FXN 3 reverse 9:69044966-69044991; SpCas9
tgctcttaaaaggtcactaaga

SEQ ID NO: 43369 - DNA, 21 bp, Artificial Sequence
  Synthetic: FXN 3 reverse 9:69044967-69044991; SpCas9
gctcttaaaaggtcactaaga

SEQ ID NO: 43370 - DNA, 20 bp, Artificial Sequence
  Synthetic: FXN 3 reverse 9:69044968-69044991; SpCas9
ctcttaaaaggtcactaaga

SEQ ID NO: 43371 - DNA, 19 bp, Artificial Sequence
  Synthetic: FXN 3 reverse 9:69044969-69044991; SpCas9
tcttaaaaggtcactaaga

SEQ ID NO: 43372 - DNA, 18 bp, Artificial Sequence
  Synthetic: FXN 3 reverse 9:69044970-69044991; SpCas9
cttaaaaggtcactaaga

SEQ ID NO: 43373 - DNA, 25 bp, Artificial Sequence
  Synthetic: FXN 3 reverse 9:69044965-69044993; SpCas9
cacaatgctcttaaaaggtcactaa

SEQ ID NO: 43374 - DNA, 24 bp, Artificial Sequence
  Synthetic: FXN 3 reverse 9:69044966-69044993; SpCas9
acaatgctcttaaaaggtcactaa

SEQ ID NO: 43375 - DNA, 23 bp, Artificial Sequence
  Synthetic: FXN 3 reverse 9:69044967-69044993; SpCas9
caatgctcttaaaaggtcactaa

SEQ ID NO: 43376 - DNA, 22 bp, Artificial Sequence
  Synthetic: FXN 3 reverse 9:69044968-69044993; SpCas9
aatgctcttaaaaggtcactaa

SEQ ID NO: 43377 - DNA, 21 bp, Artificial Sequence
  Synthetic: FXN 3 reverse 9:69044969-69044993; SpCas9
atgctcttaaaaggtcactaa

SEQ ID NO: 43378 - DNA, 20 bp, Artificial Sequence
  Synthetic: FXN 3 reverse 9:69044970-69044993; SpCas9
tgctcttaaaaggtcactaa

SEQ ID NO: 43379 - DNA, 19 bp, Artificial Sequence
  Synthetic: FXN 3 reverse 9:69044971-69044993; SpCas9
gctcttaaaaggtcactaa

SEQ ID NO: 43380 - DNA, 18 bp, Artificial Sequence
  Synthetic: FXN 3 reverse 9:69044972-69044993; SpCas9
ctcttaaaaggtcactaa

SEQ ID NO: 43381 - DNA, 25 bp, Artificial Sequence
  Synthetic: FXN 3 forward 9:69044966-69044994; SpCas9
tcttagtgaccttttaagagcattg

SEQ ID NO: 43382 - DNA, 24 bp, Artificial Sequence
  Synthetic: FXN 3 forward 9:69044967-69044994; SpCas9
cttagtgaccttttaagagcattg

SEQ ID NO: 43383 - DNA, 23 bp, Artificial Sequence
  Synthetic: FXN 3 forward 9:69044968-69044994; SpCas9
ttagtgaccttttaagagcattg

SEQ ID NO: 43384 - DNA, 22 bp, Artificial Sequence
  Synthetic: FXN 3 forward 9:69044969-69044994; SpCas9
tagtgaccttttaagagcattg

SEQ ID NO: 43385 - DNA, 21 bp, Artificial Sequence
  Synthetic: FXN 3 forward 9:69044970-69044994; SpCas9
agtgaccttttaagagcattg

SEQ ID NO: 43386 - DNA, 20 bp, Artificial Sequence
  Synthetic: FXN 3 forward 9:69044971-69044994; SpCas9
gtgaccttttaagagcattg

SEQ ID NO: 43387 - DNA, 19 bp, Artificial Sequence
  Synthetic: FXN 3 forward 9:69044972-69044994; SpCas9
tgaccttttaagagcattg

SEQ ID NO: 43388 - DNA, 18 bp, Artificial Sequence
  Synthetic: FXN 3 forward 9:69044973-69044994; SpCas9
gaccttttaagagcattg

SEQ ID NO: 43389 - DNA, 25 bp, Artificial Sequence
  Synthetic: FXN 3 reverse 9:69044967-69044995; SpCas9
tccacaatgctcttaaaaggtcact

SEQ ID NO: 43390 - DNA, 24 bp, Artificial Sequence
  Synthetic: FXN 3 reverse 9:69044968-69044995; SpCas9
ccacaatgctcttaaaaggtcact

SEQ ID NO: 43391 - DNA, 23 bp, Artificial Sequence
  Synthetic: FXN 3 reverse 9:69044969-69044995; SpCas9
cacaatgctcttaaaaggtcact

SEQ ID NO: 43392 - DNA, 22 bp, Artificial Sequence
  Synthetic: FXN 3 reverse 9:69044970-69044995; SpCas9
acaatgctcttaaaaggtcact

SEQ ID NO: 43393 - DNA, 21 bp, Artificial Sequence
  Synthetic: FXN 3 reverse 9:69044971-69044995; SpCas9
caatgctcttaaaaggtcact

SEQ ID NO: 43394 - DNA, 20 bp, Artificial Sequence
  Synthetic: FXN 3 reverse 9:69044972-69044995; SpCas9
aatgctcttaaaaggtcact

SEQ ID NO: 43395 - DNA, 19 bp, Artificial Sequence
  Synthetic: FXN 3 reverse 9:69044973-69044995; SpCas9
atgctcttaaaaggtcact

SEQ ID NO: 43396 - DNA, 18 bp, Artificial Sequence
  Synthetic: FXN 3 reverse 9:69044974-69044995; SpCas9
tgctcttaaaaggtcact

SEQ ID NO: 43397 - DNA, 25 bp, Artificial Sequence
  Synthetic: FXN 3 reverse 9:69044975-69045003; SpCas9
gggaggcatccacaatgctcttaaa

SEQ ID NO: 43398 - DNA, 24 bp, Artificial Sequence
  Synthetic: FXN 3 reverse 9:69044976-69045003; SpCas9
ggaggcatccacaatgctcttaaa

SEQ ID NO: 43399 - DNA, 23 bp, Artificial Sequence
  Synthetic: FXN 3 reverse 9:69044977-69045003; SpCas9
gaggcatccacaatgctcttaaa

SEQ ID NO: 43400 - DNA, 22 bp, Artificial Sequence
  Synthetic: FXN 3 reverse 9:69044978-69045003; SpCas9
aggcatccacaatgctcttaaa

SEQ ID NO: 43401 - DNA, 21 bp, Artificial Sequence
  Synthetic: FXN 3 reverse 9:69044979-69045003; SpCas9
ggcatccacaatgctcttaaa

SEQ ID NO: 43402 - DNA, 20 bp, Artificial Sequence
  Synthetic: FXN 3 reverse 9:69044980-69045003; SpCas9
gcatccacaatgctcttaaa

SEQ ID NO: 43403 - DNA, 19 bp, Artificial Sequence
  Synthetic: FXN 3 reverse 9:69044981-69045003; SpCas9
catccacaatgctcttaaa

SEQ ID NO: 43404 - DNA, 18 bp, Artificial Sequence
  Synthetic: FXN 3 reverse 9:69044982-69045003; SpCas9
atccacaatgctcttaaa

SEQ ID NO: 43405 - DNA, 25 bp, Artificial Sequence
  Synthetic: FXN 3 reverse 9:69044976-69045004; SpCas9
tgggaggcatccacaatgctcttaa

SEQ ID NO: 43406 - DNA, 24 bp, Artificial Sequence
  Synthetic: FXN 3 reverse 9:69044977-69045004; SpCas9
gggaggcatccacaatgctcttaa

SEQ ID NO: 43407 - DNA, 23 bp, Artificial Sequence
  Synthetic: FXN 3 reverse 9:69044978-69045004; SpCas9
ggaggcatccacaatgctcttaa

SEQ ID NO: 43408 - DNA, 22 bp, Artificial Sequence
  Synthetic: FXN 3 reverse 9:69044979-69045004; SpCas9
gaggcatccacaatgctcttaa

SEQ ID NO: 43409 - DNA, 21 bp, Artificial Sequence
  Synthetic: FXN 3 reverse 9:69044980-69045004; SpCas9
aggcatccacaatgctcttaa

SEQ ID NO: 43410 - DNA, 20 bp, Artificial Sequence
  Synthetic: FXN 3 reverse 9:69044981-69045004; SpCas9
ggcatccacaatgctcttaa

SEQ ID NO: 43411 - DNA, 19 bp, Artificial Sequence
  Synthetic: FXN 3 reverse 9:69044982-69045004; SpCas9
gcatccacaatgctcttaa

SEQ ID NO: 43412 - DNA, 18 bp, Artificial Sequence
  Synthetic: FXN 3 reverse 9:69044983-69045004; SpCas9
catccacaatgctcttaa

SEQ ID NO: 43413 - DNA, 25 bp, Artificial Sequence
  Synthetic: FXN 3 forward 9:69044977-69045005; SpCas9
ttttaagagcattgtggatgcctcc

SEQ ID NO: 43414 - DNA, 24 bp, Artificial Sequence
  Synthetic: FXN 3 forward 9:69044978-69045005; SpCas9
tttaagagcattgtggatgcctcc

SEQ ID NO: 43415 - DNA, 23 bp, Artificial Sequence
  Synthetic: FXN 3 forward 9:69044979-69045005; SpCas9
ttaagagcattgtggatgcctcc

SEQ ID NO: 43416 - DNA, 22 bp, Artificial Sequence
  Synthetic: FXN 3 forward 9:69044980-69045005; SpCas9
taagagcattgtggatgcctcc

SEQ ID NO: 43417 - DNA, 21 bp, Artificial Sequence
  Synthetic: FXN 3 forward 9:69044981-69045005; SpCas9
aagagcattgtggatgcctcc

SEQ ID NO: 43418 - DNA, 20 bp, Artificial Sequence
  Synthetic: FXN 3 forward 9:69044982-69045005; SpCas9
agagcattgtggatgcctcc

SEQ ID NO: 43419 - DNA, 19 bp, Artificial Sequence
  Synthetic: FXN 3 forward 9:69044983-69045005; SpCas9
gagcattgtggatgcctcc

SEQ ID NO: 43420 - DNA, 18 bp, Artificial Sequence
  Synthetic: FXN 3 forward 9:69044984-69045005; SpCas9
agcattgtggatgcctcc

SEQ ID NO: 43421 - DNA, 25 bp, Artificial Sequence
  Synthetic: FXN 3 reverse 9:69044997-69045025; SpCas9
acagggtggttagcaggaggctggg

SEQ ID NO: 43422 - DNA, 24 bp, Artificial Sequence
  Synthetic: FXN 3 reverse 9:69044998-69045025; SpCas9
cagggtggttagcaggaggctggg

SEQ ID NO: 43423 - DNA, 23 bp, Artificial Sequence
  Synthetic: FXN 3 reverse 9:69044999-69045025; SpCas9
agggtggttagcaggaggctggg

SEQ ID NO: 43424 - DNA, 22 bp, Artificial Sequence
  Synthetic: FXN 3 reverse 9:69045000-69045025; SpCas9
gggtggttagcaggaggctggg

SEQ ID NO: 43425 - DNA, 21 bp, Artificial Sequence
  Synthetic: FXN 3 reverse 9:69045001-69045025; SpCas9
ggtggttagcaggaggctggg

SEQ ID NO: 43426 - DNA, 20 bp, Artificial Sequence
  Synthetic: FXN 3 reverse 9:69045002-69045025; SpCas9
gtggttagcaggaggctggg

SEQ ID NO: 43427 - DNA, 19 bp, Artificial Sequence
  Synthetic: FXN 3 reverse 9:69045003-69045025; SpCas9
tggttagcaggaggctggg

SEQ ID NO: 43428 - DNA, 18 bp, Artificial Sequence
  Synthetic: FXN 3 reverse 9:69045004-69045025; SpCas9
ggttagcaggaggctggg

SEQ ID NO: 43429 - DNA, 25 bp, Artificial Sequence
  Synthetic: FXN 3 reverse 9:69044998-69045026; SpCas9
tacagggtggttagcaggaggctgg

SEQ ID NO: 43430 - DNA, 24 bp, Artificial Sequence
  Synthetic: FXN 3 reverse 9:69044999-69045026; SpCas9
acagggtggttagcaggaggctgg

SEQ ID NO: 43431 - DNA, 23 bp, Artificial Sequence
  Synthetic: FXN 3 reverse 9:69045000-69045026; SpCas9
cagggtggttagcaggaggctgg

SEQ ID NO: 43432 - DNA, 22 bp, Artificial Sequence
  Synthetic: FXN 3 reverse 9:69045001-69045026; SpCas9
agggtggttagcaggaggctgg

SEQ ID NO: 43433 - DNA, 21 bp, Artificial Sequence
  Synthetic: FXN 3 reverse 9:69045002-69045026; SpCas9
gggtggttagcaggaggctgg

SEQ ID NO: 43434 - DNA, 20 bp, Artificial Sequence
  Synthetic: FXN 3 reverse 9:69045003-69045026; SpCas9
ggtggttagcaggaggctgg

SEQ ID NO: 43435 - DNA, 19 bp, Artificial Sequence
  Synthetic: FXN 3 reverse 9:69045004-69045026; SpCas9
gtggttagcaggaggctgg

SEQ ID NO: 43436 - DNA, 18 bp, Artificial Sequence
  Synthetic: FXN 3 reverse 9:69045005-69045026; SpCas9
tggttagcaggaggctgg

SEQ ID NO: 43437 - DNA, 25 bp, Artificial Sequence
  Synthetic: FXN 3 reverse 9:69045000-69045028; SpCas9
gttacagggtggttagcaggaggct

SEQ ID NO: 43438 - DNA, 24 bp, Artificial Sequence
  Synthetic: FXN 3 reverse 9:69045001-69045028; SpCas9
ttacagggtggttagcaggaggct

SEQ ID NO: 43439 - DNA, 23 bp, Artificial Sequence
  Synthetic: FXN 3 reverse 9:69045002-69045028; SpCas9
tacagggtggttagcaggaggct

SEQ ID NO: 43440 - DNA, 22 bp, Artificial Sequence
  Synthetic: FXN 3 reverse 9:69045003-69045028; SpCas9
acagggtggttagcaggaggct

SEQ ID NO: 43441 - DNA, 21 bp, Artificial Sequence
  Synthetic: FXN 3 reverse 9:69045004-69045028; SpCas9
cagggtggttagcaggaggct

SEQ ID NO: 43442 - DNA, 20 bp, Artificial Sequence
  Synthetic: FXN 3 reverse 9:69045005-69045028; SpCas9
agggtggttagcaggaggct

SEQ ID NO: 43443 - DNA, 19 bp, Artificial Sequence
  Synthetic: FXN 3 reverse 9:69045006-69045028; SpCas9
gggtggttagcaggaggct

SEQ ID NO: 43444 - DNA, 18 bp, Artificial Sequence
  Synthetic: FXN 3 reverse 9:69045007-69045028; SpCas9
ggtggttagcaggaggct

SEQ ID NO: 43445 - DNA, 25 bp, Artificial Sequence
  Synthetic: FXN 3 reverse 9:69045001-69045029; SpCas9
ggttacagggtggttagcaggaggc

SEQ ID NO: 43446 - DNA, 24 bp, Artificial Sequence
  Synthetic: FXN 3 reverse 9:69045002-69045029; SpCas9
gttacagggtggttagcaggaggc

SEQ ID NO: 43447 - DNA, 23 bp, Artificial Sequence
  Synthetic: FXN 3 reverse 9:69045003-69045029; SpCas9
ttacagggtggttagcaggaggc

SEQ ID NO: 43448 - DNA, 22 bp, Artificial Sequence
  Synthetic: FXN 3 reverse 9:69045004-69045029; SpCas9
tacagggtggttagcaggaggc

SEQ ID NO: 43449 - DNA, 21 bp, Artificial Sequence
  Synthetic: FXN 3 reverse 9:69045005-69045029; SpCas9
acagggtggttagcaggaggc

SEQ ID NO: 43450 - DNA, 20 bp, Artificial Sequence
  Synthetic: FXN 3 reverse 9:69045006-69045029; SpCas9
cagggtggttagcaggaggc

SEQ ID NO: 43451 - DNA, 19 bp, Artificial Sequence
  Synthetic: FXN 3 reverse 9:69045007-69045029; SpCas9
agggtggttagcaggaggc

SEQ ID NO: 43452 - DNA, 18 bp, Artificial Sequence
  Synthetic: FXN 3 reverse 9:69045008-69045029; SpCas9
gggtggttagcaggaggc

SEQ ID NO: 43453 - DNA, 25 bp, Artificial Sequence
  Synthetic: FXN 3 reverse 9:69045005-69045033; SpCas9
ttcaggttacagggtggttagcagg

SEQ ID NO: 43454 - DNA, 24 bp, Artificial Sequence
  Synthetic: FXN 3 reverse 9:69045006-69045033; SpCas9
tcaggttacagggtggttagcagg

SEQ ID NO: 43455 - DNA, 23 bp, Artificial Sequence
  Synthetic: FXN 3 reverse 9:69045007-69045033; SpCas9
caggttacagggtggttagcagg

SEQ ID NO: 43456 - DNA, 22 bp, Artificial Sequence
  Synthetic: FXN 3 reverse 9:69045008-69045033; SpCas9
aggttacagggtggttagcagg

SEQ ID NO: 43457 - DNA, 21 bp, Artificial Sequence
  Synthetic: FXN 3 reverse 9:69045009-69045033; SpCas9
ggttacagggtggttagcagg

SEQ ID NO: 43458 - DNA, 20 bp, Artificial Sequence
  Synthetic: FXN 3 reverse 9:69045010-69045033; SpCas9
gttacagggtggttagcagg

SEQ ID NO: 43459 - DNA, 19 bp, Artificial Sequence
  Synthetic: FXN 3 reverse 9:69045011-69045033; SpCas9
ttacagggtggttagcagg

SEQ ID NO: 43460 - DNA, 18 bp, Artificial Sequence
  Synthetic: FXN 3 reverse 9:69045012-69045033; SpCas9
tacagggtggttagcagg

SEQ ID NO: 43461 - DNA, 25 bp, Artificial Sequence
  Synthetic: FXN 3 reverse 9:69045006-69045034; SpCas9
gttcaggttacagggtggttagcag

SEQ ID NO: 43462 - DNA, 24 bp, Artificial Sequence
  Synthetic: FXN 3 reverse 9:69045007-69045034; SpCas9
ttcaggttacagggtggttagcag

SEQ ID NO: 43463 - DNA, 23 bp, Artificial Sequence
  Synthetic: FXN 3 reverse 9:69045008-69045034; SpCas9
tcaggttacagggtggttagcag

SEQ ID NO: 43464 - DNA, 22 bp, Artificial Sequence
  Synthetic: FXN 3 reverse 9:69045009-69045034; SpCas9
caggttacagggtggttagcag

SEQ ID NO: 43465 - DNA, 21 bp, Artificial Sequence
  Synthetic: FXN 3 reverse 9:69045010-69045034; SpCas9
aggttacagggtggttagcag

SEQ ID NO: 43466 - DNA, 20 bp, Artificial Sequence
  Synthetic: FXN 3 reverse 9:69045011-69045034; SpCas9
ggttacagggtggttagcag

SEQ ID NO: 43467 - DNA, 19 bp, Artificial Sequence
  Synthetic: FXN 3 reverse 9:69045012-69045034; SpCas9
gttacagggtggttagcag

SEQ ID NO: 43468 - DNA, 18 bp, Artificial Sequence
  Synthetic: FXN 3 reverse 9:69045013-69045034; SpCas9
ttacagggtggttagcag

SEQ ID NO: 43469 - DNA, 25 bp, Artificial Sequence
  Synthetic: FXN 3 forward 9:69045008-69045036; SpCas9
cctgctaaccaccctgtaacctgaa

SEQ ID NO: 43470 - DNA, 24 bp, Artificial Sequence
  Synthetic: FXN 3 forward 9:69045009-69045036; SpCas9
ctgctaaccaccctgtaacctgaa

SEQ ID NO: 43471 - DNA, 23 bp, Artificial Sequence
  Synthetic: FXN 3 forward 9:69045010-69045036; SpCas9
tgctaaccaccctgtaacctgaa

SEQ ID NO: 43472 - DNA, 22 bp, Artificial Sequence
  Synthetic: FXN 3 forward 9:69045011-69045036; SpCas9
gctaaccaccctgtaacctgaa

SEQ ID NO: 43473 - DNA, 21 bp, Artificial Sequence
  Synthetic: FXN 3 forward 9:69045012-69045036; SpCas9
ctaaccaccctgtaacctgaa

SEQ ID NO: 43474 - DNA, 20 bp, Artificial Sequence
  Synthetic: FXN 3 forward 9:69045013-69045036; SpCas9
taaccaccctgtaacctgaa

SEQ ID NO: 43475 - DNA, 19 bp, Artificial Sequence
  Synthetic: FXN 3 forward 9:69045014-69045036; SpCas9
aaccaccctgtaacctgaa

SEQ ID NO: 43476 - DNA, 18 bp, Artificial Sequence
  Synthetic: FXN 3 forward 9:69045015-69045036; SpCas9
accaccctgtaacctgaa

SEQ ID NO: 43477 - DNA, 25 bp, Artificial Sequence
  Synthetic: FXN 3 reverse 9:69045008-69045036; SpCas9
ctgttcaggttacagggtggttagc

SEQ ID NO: 43478 - DNA, 24 bp, Artificial Sequence
  Synthetic: FXN 3 reverse 9:69045009-69045036; SpCas9
tgttcaggttacagggtggttagc

SEQ ID NO: 43479 - DNA, 23 bp, Artificial Sequence
  Synthetic: FXN 3 reverse 9:69045010-69045036; SpCas9
gttcaggttacagggtggttagc

SEQ ID NO: 43480 - DNA, 22 bp, Artificial Sequence
  Synthetic: FXN 3 reverse 9:69045011-69045036; SpCas9
ttcaggttacagggtggttagc

SEQ ID NO: 43481 - DNA, 21 bp, Artificial Sequence
  Synthetic: FXN 3 reverse 9:69045012-69045036; SpCas9
tcaggttacagggtggttagc

SEQ ID NO: 43482 - DNA, 20 bp, Artificial Sequence
  Synthetic: FXN 3 reverse 9:69045013-69045036; SpCas9
caggttacagggtggttagc

SEQ ID NO: 43483 - DNA, 19 bp, Artificial Sequence
  Synthetic: FXN 3 reverse 9:69045014-69045036; SpCas9
aggttacagggtggttagc

SEQ ID NO: 43484 - DNA, 18 bp, Artificial Sequence
  Synthetic: FXN 3 reverse 9:69045015-69045036; SpCas9
ggttacagggtggttagc

SEQ ID NO: 43485 - DNA, 25 bp, Artificial Sequence
  Synthetic: FXN 3 reverse 9:69045009-69045037; SpCas9
gctgttcaggttacagggtggttag

SEQ ID NO: 43486 - DNA, 24 bp, Artificial Sequence
  Synthetic: FXN 3 reverse 9:69045010-69045037; SpCas9
ctgttcaggttacagggtggttag

SEQ ID NO: 43487 - DNA, 23 bp, Artificial Sequence
  Synthetic: FXN 3 reverse 9:69045011-69045037; SpCas9
tgttcaggttacagggtggttag

SEQ ID NO: 43488 - DNA, 22 bp, Artificial Sequence
  Synthetic: FXN 3 reverse 9:69045012-69045037; SpCas9
gttcaggttacagggtggttag

SEQ ID NO: 43489 - DNA, 21 bp, Artificial Sequence
  Synthetic: FXN 3 reverse 9:69045013-69045037; SpCas9
ttcaggttacagggtggttag

SEQ ID NO: 43490 - DNA, 20 bp, Artificial Sequence
  Synthetic: FXN 3 reverse 9:69045014-69045037; SpCas9
tcaggttacagggtggttag

SEQ ID NO: 43491 - DNA, 19 bp, Artificial Sequence
  Synthetic: FXN 3 reverse 9:69045015-69045037; SpCas9
caggttacagggtggttag

SEQ ID NO: 43492 - DNA, 18 bp, Artificial Sequence
  Synthetic: FXN 3 reverse 9:69045016-69045037; SpCas9
aggttacagggtggttag

SEQ ID NO: 43493 - DNA, 25 bp, Artificial Sequence
  Synthetic: FXN 3 reverse 9:69045012-69045040; SpCas9
caggctgttcaggttacagggtggt

SEQ ID NO: 43494 - DNA, 24 bp, Artificial Sequence
  Synthetic: FXN 3 reverse 9:69045013-69045040; SpCas9
aggctgttcaggttacagggtggt

SEQ ID NO: 43495 - DNA, 23 bp, Artificial Sequence
  Synthetic: FXN 3 reverse 9:69045014-69045040; SpCas9
ggctgttcaggttacagggtggt

SEQ ID NO: 43496 - DNA, 22 bp, Artificial Sequence
  Synthetic: FXN 3 reverse 9:69045015-69045040; SpCas9
gctgttcaggttacagggtggt

SEQ ID NO: 43497 - DNA, 21 bp, Artificial Sequence
  Synthetic: FXN 3 reverse 9:69045016-69045040; SpCas9
ctgttcaggttacagggtggt

SEQ ID NO: 43498 - DNA, 20 bp, Artificial Sequence
  Synthetic: FXN 3 reverse 9:69045017-69045040; SpCas9
tgttcaggttacagggtggt

SEQ ID NO: 43499 - DNA, 19 bp, Artificial Sequence
  Synthetic: FXN 3 reverse 9:69045018-69045040; SpCas9
gttcaggttacagggtggt

SEQ ID NO: 43500 - DNA, 18 bp, Artificial Sequence
  Synthetic: FXN 3 reverse 9:69045019-69045040; SpCas9
ttcaggttacagggtggt

SEQ ID NO: 43501 - DNA, 25 bp, Artificial Sequence
  Synthetic: FXN 3 forward 9:69045015-69045043; SpCas9
accaccctgtaacctgaacagcctg

SEQ ID NO: 43502 - DNA, 24 bp, Artificial Sequence
  Synthetic: FXN 3 forward 9:69045016-69045043; SpCas9
ccaccctgtaacctgaacagcctg

SEQ ID NO: 43503 - DNA, 23 bp, Artificial Sequence
  Synthetic: FXN 3 forward 9:69045017-69045043; SpCas9
caccctgtaacctgaacagcctg

SEQ ID NO: 43504 - DNA, 22 bp, Artificial Sequence
  Synthetic: FXN 3 forward 9:69045018-69045043; SpCas9
accctgtaacctgaacagcctg

SEQ ID NO: 43505 - DNA, 21 bp, Artificial Sequence
  Synthetic: FXN 3 forward 9:69045019-69045043; SpCas9
ccctgtaacctgaacagcctg

SEQ ID NO: 43506 - DNA, 20 bp, Artificial Sequence
  Synthetic: FXN 3 forward 9:69045020-69045043; SpCas9
cctgtaacctgaacagcctg

SEQ ID NO: 43507 - DNA, 19 bp, Artificial Sequence
  Synthetic: FXN 3 forward 9:69045021-69045043; SpCas9
ctgtaacctgaacagcctg

SEQ ID NO: 43508 - DNA, 18 bp, Artificial Sequence
  Synthetic: FXN 3 forward 9:69045022-69045043; SpCas9
tgtaacctgaacagcctg

SEQ ID NO: 43509 - DNA, 25 bp, Artificial Sequence
  Synthetic: FXN 3 reverse 9:69045016-69045044; SpCas9
gctgcaggctgttcaggttacaggg

SEQ ID NO: 43510 - DNA, 24 bp, Artificial Sequence
  Synthetic: FXN 3 reverse 9:69045017-69045044; SpCas9
ctgcaggctgttcaggttacaggg

SEQ ID NO: 43511 - DNA, 23 bp, Artificial Sequence
  Synthetic: FXN 3 reverse 9:69045018-69045044; SpCas9
tgcaggctgttcaggttacaggg

SEQ ID NO: 43512 - DNA, 22 bp, Artificial Sequence
  Synthetic: FXN 3 reverse 9:69045019-69045044; SpCas9
gcaggctgttcaggttacaggg

SEQ ID NO: 43513 - DNA, 21 bp, Artificial Sequence
  Synthetic: FXN 3 reverse 9:69045020-69045044; SpCas9
caggctgttcaggttacaggg

SEQ ID NO: 43514 - DNA, 20 bp, Artificial Sequence
  Synthetic: FXN 3 reverse 9:69045021-69045044; SpCas9
aggctgttcaggttacaggg

SEQ ID NO: 43515 - DNA, 19 bp, Artificial Sequence
  Synthetic: FXN 3 reverse 9:69045022-69045044; SpCas9
ggctgttcaggttacaggg

SEQ ID NO: 43516 - DNA, 18 bp, Artificial Sequence
  Synthetic: FXN 3 reverse 9:69045023-69045044; SpCas9
gctgttcaggttacaggg

SEQ ID NO: 43517 - DNA, 25 bp, Artificial Sequence
  Synthetic: FXN 3 forward 9:69045018-69045046; SpCas9
accctgtaacctgaacagcctgcag

SEQ ID NO: 43518 - DNA, 24 bp, Artificial Sequence
  Synthetic: FXN 3 forward 9:69045019-69045046; SpCas9
ccctgtaacctgaacagcctgcag

SEQ ID NO: 43519 - DNA, 23 bp, Artificial Sequence
  Synthetic: FXN 3 forward 9:69045020-69045046; SpCas9
cctgtaacctgaacagcctgcag

SEQ ID NO: 43520 - DNA, 22 bp, Artificial Sequence
  Synthetic: FXN 3 forward 9:69045021-69045046; SpCas9
ctgtaacctgaacagcctgcag

SEQ ID NO: 43521 - DNA, 21 bp, Artificial Sequence
  Synthetic: FXN 3 forward 9:69045022-69045046; SpCas9
tgtaacctgaacagcctgcag

SEQ ID NO: 43522 - DNA, 20 bp, Artificial Sequence
  Synthetic: FXN 3 forward 9:69045023-69045046; SpCas9
gtaacctgaacagcctgcag

SEQ ID NO: 43523 - DNA, 19 bp, Artificial Sequence
  Synthetic: FXN 3 forward 9:69045024-69045046; SpCas9
taacctgaacagcctgcag

SEQ ID NO: 43524 - DNA, 18 bp, Artificial Sequence
  Synthetic: FXN 3 forward 9:69045025-69045046; SpCas9
aacctgaacagcctgcag

SEQ ID NO: 43525 - DNA, 25 bp, Artificial Sequence
  Synthetic: FXN 3 reverse 9:69045019-69045047; SpCas9
gctgctgcaggctgttcaggttaca

SEQ ID NO: 43526 - DNA, 24 bp, Artificial Sequence
  Synthetic: FXN 3 reverse 9:69045020-69045047; SpCas9
ctgctgcaggctgttcaggttaca

SEQ ID NO: 43527 - DNA, 23 bp, Artificial Sequence
  Synthetic: FXN 3 reverse 9:69045021-69045047; SpCas9
tgctgcaggctgttcaggttaca

SEQ ID NO: 43528 - DNA, 22 bp, Artificial Sequence
  Synthetic: FXN 3 reverse 9:69045022-69045047; SpCas9
gctgcaggctgttcaggttaca

SEQ ID NO: 43529 - DNA, 21 bp, Artificial Sequence
  Synthetic: FXN 3 reverse 9:69045023-69045047; SpCas9
ctgcaggctgttcaggttaca

SEQ ID NO: 43530 - DNA, 20 bp, Artificial Sequence
  Synthetic: FXN 3 reverse 9:69045024-69045047; SpCas9
tgcaggctgttcaggttaca

SEQ ID NO: 43531 - DNA, 19 bp, Artificial Sequence
  Synthetic: FXN 3 reverse 9:69045025-69045047; SpCas9
gcaggctgttcaggttaca

SEQ ID NO: 43532 - DNA, 18 bp, Artificial Sequence
  Synthetic: FXN 3 reverse 9:69045026-69045047; SpCas9
caggctgttcaggttaca

SEQ ID NO: 43533 - DNA, 25 bp, Artificial Sequence
  Synthetic: FXN 3 reverse 9:69045020-69045048; SpCas9
ggctgctgcaggctgttcaggttac

SEQ ID NO: 43534 - DNA, 24 bp, Artificial Sequence
  Synthetic: FXN 3 reverse 9:69045021-69045048; SpCas9
gctgctgcaggctgttcaggttac

SEQ ID NO: 43535 - DNA, 23 bp, Artificial Sequence
  Synthetic: FXN 3 reverse 9:69045022-69045048; SpCas9
ctgctgcaggctgttcaggttac

SEQ ID NO: 43536 - DNA, 22 bp, Artificial Sequence
  Synthetic: FXN 3 reverse 9:69045023-69045048; SpCas9
tgctgcaggctgttcaggttac

SEQ ID NO: 43537 - DNA, 21 bp, Artificial Sequence
  Synthetic: FXN 3 reverse 9:69045024-69045048; SpCas9
gctgcaggctgttcaggttac

SEQ ID NO: 43538 - DNA, 20 bp, Artificial Sequence
  Synthetic: FXN 3 reverse 9:69045025-69045048; SpCas9
ctgcaggctgttcaggttac

SEQ ID NO: 43539 - DNA, 19 bp, Artificial Sequence
  Synthetic: FXN 3 reverse 9:69045026-69045048; SpCas9
tgcaggctgttcaggttac

SEQ ID NO: 43540 - DNA, 18 bp, Artificial Sequence
  Synthetic: FXN 3 reverse 9:69045027-69045048; SpCas9
gcaggctgttcaggttac

SEQ ID NO: 43541 - DNA, 25 bp, Artificial Sequence
  Synthetic: FXN 3 reverse 9:69045021-69045049; SpCas9
gggctgctgcaggctgttcaggtta

SEQ ID NO: 43542 - DNA, 24 bp, Artificial Sequence
  Synthetic: FXN 3 reverse 9:69045022-69045049; SpCas9
ggctgctgcaggctgttcaggtta

SEQ ID NO: 43543 - DNA, 23 bp, Artificial Sequence
  Synthetic: FXN 3 reverse 9:69045023-69045049; SpCas9
gctgctgcaggctgttcaggtta

SEQ ID NO: 43544 - DNA, 22 bp, Artificial Sequence
  Synthetic: FXN 3 reverse 9:69045024-69045049; SpCas9
ctgctgcaggctgttcaggtta

SEQ ID NO: 43545 - DNA, 21 bp, Artificial Sequence
  Synthetic: FXN 3 reverse 9:69045025-69045049; SpCas9
tgctgcaggctgttcaggtta

SEQ ID NO: 43546 - DNA, 20 bp, Artificial Sequence
  Synthetic: FXN 3 reverse 9:69045026-69045049; SpCas9
gctgcaggctgttcaggtta

SEQ ID NO: 43547 - DNA, 19 bp, Artificial Sequence
  Synthetic: FXN 3 reverse 9:69045027-69045049; SpCas9
ctgcaggctgttcaggtta

SEQ ID NO: 43548 - DNA, 18 bp, Artificial Sequence
  Synthetic: FXN 3 reverse 9:69045028-69045049; SpCas9
tgcaggctgttcaggtta

SEQ ID NO: 43549 - DNA, 25 bp, Artificial Sequence
  Synthetic: FXN 3 reverse 9:69045027-69045055; SpCas9
tgggcagggctgctgcaggctgttc

SEQ ID NO: 43550 - DNA, 24 bp, Artificial Sequence
  Synthetic: FXN 3 reverse 9:69045028-69045055; SpCas9
gggcagggctgctgcaggctgttc

SEQ ID NO: 43551 - DNA, 23 bp, Artificial Sequence
  Synthetic: FXN 3 reverse 9:69045029-69045055; SpCas9
ggcagggctgctgcaggctgttc

SEQ ID NO: 43552 - DNA, 22 bp, Artificial Sequence
  Synthetic: FXN 3 reverse 9:69045030-69045055; SpCas9
gcagggctgctgcaggctgttc

SEQ ID NO: 43553 - DNA, 21 bp, Artificial Sequence
  Synthetic: FXN 3 reverse 9:69045031-69045055; SpCas9
cagggctgctgcaggctgttc

SEQ ID NO: 43554 - DNA, 20 bp, Artificial Sequence
  Synthetic: FXN 3 reverse 9:69045032-69045055; SpCas9
agggctgctgcaggctgttc

SEQ ID NO: 43555 - DNA, 19 bp, Artificial Sequence
  Synthetic: FXN 3 reverse 9:69045033-69045055; SpCas9
gggctgctgcaggctgttc

SEQ ID NO: 43556 - DNA, 18 bp, Artificial Sequence
  Synthetic: FXN 3 reverse 9:69045034-69045055; SpCas9
ggctgctgcaggctgttc

SEQ ID NO: 43557 - DNA, 25 bp, Artificial Sequence
  Synthetic: FXN 3 forward 9:69045028-69045056; SpCas9
ctgaacagcctgcagcagccctgcc

SEQ ID NO: 43558 - DNA, 24 bp, Artificial Sequence
  Synthetic: FXN 3 forward 9:69045029-69045056; SpCas9
tgaacagcctgcagcagccctgcc

SEQ ID NO: 43559 - DNA, 23 bp, Artificial Sequence
  Synthetic: FXN 3 forward 9:69045030-69045056; SpCas9
gaacagcctgcagcagccctgcc

SEQ ID NO: 43560 - DNA, 22 bp, Artificial Sequence
  Synthetic: FXN 3 forward 9:69045031-69045056; SpCas9
aacagcctgcagcagccctgcc

SEQ ID NO: 43561 - DNA, 21 bp, Artificial Sequence
  Synthetic: FXN 3 forward 9:69045032-69045056; SpCas9
acagcctgcagcagccctgcc

SEQ ID NO: 43562 - DNA, 20 bp, Artificial Sequence
  Synthetic: FXN 3 forward 9:69045033-69045056; SpCas9
cagcctgcagcagccctgcc

SEQ ID NO: 43563 - DNA, 19 bp, Artificial Sequence
  Synthetic: FXN 3 forward 9:69045034-69045056; SpCas9
agcctgcagcagccctgcc

SEQ ID NO: 43564 - DNA, 18 bp, Artificial Sequence
  Synthetic: FXN 3 forward 9:69045035-69045056; SpCas9
gcctgcagcagccctgcc

SEQ ID NO: 43565 - DNA, 25 bp, Artificial Sequence
  Synthetic: FXN 3 reverse 9:69045028-69045056; SpCas9
ctgggcagggctgctgcaggctgtt

SEQ ID NO: 43566 - DNA, 24 bp, Artificial Sequence
  Synthetic: FXN 3 reverse 9:69045029-69045056; SpCas9
tgggcagggctgctgcaggctgtt

SEQ ID NO: 43567 - DNA, 23 bp, Artificial Sequence
  Synthetic: FXN 3 reverse 9:69045030-69045056; SpCas9
gggcagggctgctgcaggctgtt

SEQ ID NO: 43568 - DNA, 22 bp, Artificial Sequence
  Synthetic: FXN 3 reverse 9:69045031-69045056; SpCas9
ggcagggctgctgcaggctgtt

SEQ ID NO: 43569 - DNA, 21 bp, Artificial Sequence
  Synthetic: FXN 3 reverse 9:69045032-69045056; SpCas9
gcagggctgctgcaggctgtt

SEQ ID NO: 43570 - DNA, 20 bp, Artificial Sequence
  Synthetic: FXN 3 reverse 9:69045033-69045056; SpCas9
cagggctgctgcaggctgtt

SEQ ID NO: 43571 - DNA, 19 bp, Artificial Sequence
  Synthetic: FXN 3 reverse 9:69045034-69045056; SpCas9
agggctgctgcaggctgtt

SEQ ID NO: 43572 - DNA, 18 bp, Artificial Sequence
  Synthetic: FXN 3 reverse 9:69045035-69045056; SpCas9
gggctgctgcaggctgtt

SEQ ID NO: 43573 - DNA, 25 bp, Artificial Sequence
  Synthetic: FXN 3 forward 9:69045031-69045059; SpCas9
aacagcctgcagcagccctgcccag

SEQ ID NO: 43574 - DNA, 24 bp, Artificial Sequence
  Synthetic: FXN 3 forward 9:69045032-69045059; SpCas9
acagcctgcagcagccctgcccag

SEQ ID NO: 43575 - DNA, 23 bp, Artificial Sequence
  Synthetic: FXN 3 forward 9:69045033-69045059; SpCas9
cagcctgcagcagccctgcccag

SEQ ID NO: 43576 - DNA, 22 bp, Artificial Sequence
  Synthetic: FXN 3 forward 9:69045034-69045059; SpCas9
agcctgcagcagccctgcccag

SEQ ID NO: 43577 - DNA, 21 bp, Artificial Sequence
  Synthetic: FXN 3 forward 9:69045035-69045059; SpCas9
gcctgcagcagccctgcccag

SEQ ID NO: 43578 - DNA, 20 bp, Artificial Sequence
  Synthetic: FXN 3 forward 9:69045036-69045059; SpCas9
cctgcagcagccctgcccag

SEQ ID NO: 43579 - DNA, 19 bp, Artificial Sequence
  Synthetic: FXN 3 forward 9:69045037-69045059; SpCas9
ctgcagcagccctgcccag

SEQ ID NO: 43580 - DNA, 18 bp, Artificial Sequence
  Synthetic: FXN 3 forward 9:69045038-69045059; SpCas9
tgcagcagccctgcccag

SEQ ID NO: 43581 - DNA, 25 bp, Artificial Sequence
  Synthetic: FXN 3 reverse 9:69045036-69045064; SpCas9
aagttctactgggcagggctgctgc

SEQ ID NO: 43582 - DNA, 24 bp, Artificial Sequence
  Synthetic: FXN 3 reverse 9:69045037-69045064; SpCas9
agttctactgggcagggctgctgc

SEQ ID NO: 43583 - DNA, 23 bp, Artificial Sequence
  Synthetic: FXN 3 reverse 9:69045038-69045064; SpCas9
gttctactgggcagggctgctgc

SEQ ID NO: 43584 - DNA, 22 bp, Artificial Sequence
  Synthetic: FXN 3 reverse 9:69045039-69045064; SpCas9
ttctactgggcagggctgctgc

SEQ ID NO: 43585 - DNA, 21 bp, Artificial Sequence
  Synthetic: FXN 3 reverse 9:69045040-69045064; SpCas9
tctactgggcagggctgctgc

SEQ ID NO: 43586 - DNA, 20 bp, Artificial Sequence
  Synthetic: FXN 3 reverse 9:69045041-69045064; SpCas9
ctactgggcagggctgctgc

SEQ ID NO: 43587 - DNA, 19 bp, Artificial Sequence
  Synthetic: FXN 3 reverse 9:69045042-69045064; SpCas9
tactgggcagggctgctgc

SEQ ID NO: 43588 - DNA, 18 bp, Artificial Sequence
  Synthetic: FXN 3 reverse 9:69045043-69045064; SpCas9
actgggcagggctgctgc

SEQ ID NO: 43589 - DNA, 25 bp, Artificial Sequence
  Synthetic: FXN 3 reverse 9:69045037-69045065; SpCas9
gaagttctactgggcagggctgctg

SEQ ID NO: 43590 - DNA, 24 bp, Artificial Sequence
  Synthetic: FXN 3 reverse 9:69045038-69045065; SpCas9
aagttctactgggcagggctgctg

SEQ ID NO: 43591 - DNA, 23 bp, Artificial Sequence
  Synthetic: FXN 3 reverse 9:69045039-69045065; SpCas9
agttctactgggcagggctgctg

SEQ ID NO: 43592 - DNA, 22 bp, Artificial Sequence
  Synthetic: FXN 3 reverse 9:69045040-69045065; SpCas9
gttctactgggcagggctgctg

SEQ ID NO: 43593 - DNA, 21 bp, Artificial Sequence
  Synthetic: FXN 3 reverse 9:69045041-69045065; SpCas9
ttctactgggcagggctgctg

SEQ ID NO: 43594 - DNA, 20 bp, Artificial Sequence
  Synthetic: FXN 3 reverse 9:69045042-69045065; SpCas9
tctactgggcagggctgctg

SEQ ID NO: 43595 - DNA, 19 bp, Artificial Sequence
  Synthetic: FXN 3 reverse 9:69045043-69045065; SpCas9
ctactgggcagggctgctg

SEQ ID NO: 43596 - DNA, 18 bp, Artificial Sequence
  Synthetic: FXN 3 reverse 9:69045044-69045065; SpCas9
tactgggcagggctgctg

SEQ ID NO: 43597 - DNA, 25 bp, Artificial Sequence
  Synthetic: FXN 3 reverse 9:69045046-69045074; SpCas9
tcacatcaggaagttctactgggca

SEQ ID NO: 43598 - DNA, 24 bp, Artificial Sequence
  Synthetic: FXN 3 reverse 9:69045047-69045074; SpCas9
cacatcaggaagttctactgggca

SEQ ID NO: 43599 - DNA, 23 bp, Artificial Sequence
  Synthetic: FXN 3 reverse 9:69045048-69045074; SpCas9
acatcaggaagttctactgggca

SEQ ID NO: 43600 - DNA, 22 bp, Artificial Sequence
  Synthetic: FXN 3 reverse 9:69045049-69045074; SpCas9
catcaggaagttctactgggca

SEQ ID NO: 43601 - DNA, 21 bp, Artificial Sequence
  Synthetic: FXN 3 reverse 9:69045050-69045074; SpCas9
atcaggaagttctactgggca

SEQ ID NO: 43602 - DNA, 20 bp, Artificial Sequence
  Synthetic: FXN 3 reverse 9:69045051-69045074; SpCas9
tcaggaagttctactgggca

SEQ ID NO: 43603 - DNA, 19 bp, Artificial Sequence
  Synthetic: FXN 3 reverse 9:69045052-69045074; SpCas9
caggaagttctactgggca

SEQ ID NO: 43604 - DNA, 18 bp, Artificial Sequence
  Synthetic: FXN 3 reverse 9:69045053-69045074; SpCas9
aggaagttctactgggca

SEQ ID NO: 43605 - DNA, 25 bp, Artificial Sequence
  Synthetic: FXN 3 reverse 9:69045047-69045075; SpCas9
atcacatcaggaagttctactgggc

SEQ ID NO: 43606 - DNA, 24 bp, Artificial Sequence
  Synthetic: FXN 3 reverse 9:69045048-69045075; SpCas9
tcacatcaggaagttctactgggc

SEQ ID NO: 43607 - DNA, 23 bp, Artificial Sequence
  Synthetic: FXN 3 reverse 9:69045049-69045075; SpCas9
cacatcaggaagttctactgggc

SEQ ID NO: 43608 - DNA, 22 bp, Artificial Sequence
  Synthetic: FXN 3 reverse 9:69045050-69045075; SpCas9
acatcaggaagttctactgggc

SEQ ID NO: 43609 - DNA, 21 bp, Artificial Sequence
  Synthetic: FXN 3 reverse 9:69045051-69045075; SpCas9
catcaggaagttctactgggc

SEQ ID NO: 43610 - DNA, 20 bp, Artificial Sequence
  Synthetic: FXN 3 reverse 9:69045052-69045075; SpCas9
atcaggaagttctactgggc

SEQ ID NO: 43611 - DNA, 19 bp, Artificial Sequence
  Synthetic: FXN 3 reverse 9:69045053-69045075; SpCas9
tcaggaagttctactgggc

SEQ ID NO: 43612 - DNA, 18 bp, Artificial Sequence
  Synthetic: FXN 3 reverse 9:69045054-69045075; SpCas9
caggaagttctactgggc

SEQ ID NO: 43613 - DNA, 25 bp, Artificial Sequence
  Synthetic: FXN 3 reverse 9:69045048-69045076; SpCas9
catcacatcaggaagttctactggg

SEQ ID NO: 43614 - DNA, 24 bp, Artificial Sequence
  Synthetic: FXN 3 reverse 9:69045049-69045076; SpCas9
atcacatcaggaagttctactggg

SEQ ID NO: 43615 - DNA, 23 bp, Artificial Sequence
  Synthetic: FXN 3 reverse 9:69045050-69045076; SpCas9
tcacatcaggaagttctactggg

SEQ ID NO: 43616 - DNA, 22 bp, Artificial Sequence
  Synthetic: FXN 3 reverse 9:69045051-69045076; SpCas9
cacatcaggaagttctactggg

SEQ ID NO: 43617 - DNA, 21 bp, Artificial Sequence
  Synthetic: FXN 3 reverse 9:69045052-69045076; SpCas9
acatcaggaagttctactggg

SEQ ID NO: 43618 - DNA, 20 bp, Artificial Sequence
  Synthetic: FXN 3 reverse 9:69045053-69045076; SpCas9
catcaggaagttctactggg

SEQ ID NO: 43619 - DNA, 19 bp, Artificial Sequence
  Synthetic: FXN 3 reverse 9:69045054-69045076; SpCas9
atcaggaagttctactggg

SEQ ID NO: 43620 - DNA, 18 bp, Artificial Sequence
  Synthetic: FXN 3 reverse 9:69045055-69045076; SpCas9
tcaggaagttctactggg

SEQ ID NO: 43621 - DNA, 25 bp, Artificial Sequence
  Synthetic: FXN 3 forward 9:69045049-69045077; SpCas9
tgcccagtagaacttcctgatgtga

SEQ ID NO: 43622 - DNA, 24 bp, Artificial Sequence
  Synthetic: FXN 3 forward 9:69045050-69045077; SpCas9
gcccagtagaacttcctgatgtga

SEQ ID NO: 43623 - DNA, 23 bp, Artificial Sequence
  Synthetic: FXN 3 forward 9:69045051-69045077; SpCas9
cccagtagaacttcctgatgtga

SEQ ID NO: 43624 - DNA, 22 bp, Artificial Sequence
  Synthetic: FXN 3 forward 9:69045052-69045077; SpCas9
ccagtagaacttcctgatgtga

SEQ ID NO: 43625 - DNA, 21 bp, Artificial Sequence
  Synthetic: FXN 3 forward 9:69045053-69045077; SpCas9
cagtagaacttcctgatgtga

SEQ ID NO: 43626 - DNA, 20 bp, Artificial Sequence
  Synthetic: FXN 3 forward 9:69045054-69045077; SpCas9
agtagaacttcctgatgtga

SEQ ID NO: 43627 - DNA, 19 bp, Artificial Sequence
  Synthetic: FXN 3 forward 9:69045055-69045077; SpCas9
gtagaacttcctgatgtga

SEQ ID NO: 43628 - DNA, 18 bp, Artificial Sequence
  Synthetic: FXN 3 forward 9:69045056-69045077; SpCas9
tagaacttcctgatgtga

SEQ ID NO: 43629 - DNA, 25 bp, Artificial Sequence
  Synthetic: FXN 3 reverse 9:69045051-69045079; SpCas9
ttccatcacatcaggaagttctact

SEQ ID NO: 43630 - DNA, 24 bp, Artificial Sequence
  Synthetic: FXN 3 reverse 9:69045052-69045079; SpCas9
tccatcacatcaggaagttctact

SEQ ID NO: 43631 - DNA, 23 bp, Artificial Sequence
  Synthetic: FXN 3 reverse 9:69045053-69045079; SpCas9
ccatcacatcaggaagttctact

SEQ ID NO: 43632 - DNA, 22 bp, Artificial Sequence
  Synthetic: FXN 3 reverse 9:69045054-69045079; SpCas9
catcacatcaggaagttctact

SEQ ID NO: 43633 - DNA, 21 bp, Artificial Sequence
  Synthetic: FXN 3 reverse 9:69045055-69045079; SpCas9
atcacatcaggaagttctact

SEQ ID NO: 43634 - DNA, 20 bp, Artificial Sequence
  Synthetic: FXN 3 reverse 9:69045056-69045079; SpCas9
tcacatcaggaagttctact

SEQ ID NO: 43635 - DNA, 19 bp, Artificial Sequence
  Synthetic: FXN 3 reverse 9:69045057-69045079; SpCas9
cacatcaggaagttctact

SEQ ID NO: 43636 - DNA, 18 bp, Artificial Sequence
  Synthetic: FXN 3 reverse 9:69045058-69045079; SpCas9
acatcaggaagttctact

SEQ ID NO: 43637 - DNA, 25 bp, Artificial Sequence
  Synthetic: FXN 3 reverse 9:69045052-69045080; SpCas9
tttccatcacatcaggaagttctac

SEQ ID NO: 43638 - DNA, 24 bp, Artificial Sequence
  Synthetic: FXN 3 reverse 9:69045053-69045080; SpCas9
ttccatcacatcaggaagttctac

SEQ ID NO: 43639 - DNA, 23 bp, Artificial Sequence
  Synthetic: FXN 3 reverse 9:69045054-69045080; SpCas9
tccatcacatcaggaagttctac

SEQ ID NO: 43640 - DNA, 22 bp, Artificial Sequence
  Synthetic: FXN 3 reverse 9:69045055-69045080; SpCas9
ccatcacatcaggaagttctac

SEQ ID NO: 43641 - DNA, 21 bp, Artificial Sequence
  Synthetic: FXN 3 reverse 9:69045056-69045080; SpCas9
catcacatcaggaagttctac

SEQ ID NO: 43642 - DNA, 20 bp, Artificial Sequence
  Synthetic: FXN 3 reverse 9:69045057-69045080; SpCas9
atcacatcaggaagttctac

SEQ ID NO: 43643 - DNA, 19 bp, Artificial Sequence
  Synthetic: FXN 3 reverse 9:69045058-69045080; SpCas9
tcacatcaggaagttctac

SEQ ID NO: 43644 - DNA, 18 bp, Artificial Sequence
  Synthetic: FXN 3 reverse 9:69045059-69045080; SpCas9
cacatcaggaagttctac

SEQ ID NO: 43645 - DNA, 25 bp, Artificial Sequence
  Synthetic: FXN 3 reverse 9:69045061-69045089; SpCas9
gacacagcatttccatcacatcagg

SEQ ID NO: 43646 - DNA, 24 bp, Artificial Sequence
  Synthetic: FXN 3 reverse 9:69045062-69045089; SpCas9
acacagcatttccatcacatcagg

SEQ ID NO: 43647 - DNA, 23 bp, Artificial Sequence
  Synthetic: FXN 3 reverse 9:69045063-69045089; SpCas9
cacagcatttccatcacatcagg

SEQ ID NO: 43648 - DNA, 22 bp, Artificial Sequence
  Synthetic: FXN 3 reverse 9:69045064-69045089; SpCas9
acagcatttccatcacatcagg

SEQ ID NO: 43649 - DNA, 21 bp, Artificial Sequence
  Synthetic: FXN 3 reverse 9:69045065-69045089; SpCas9
cagcatttccatcacatcagg

SEQ ID NO: 43650 - DNA, 20 bp, Artificial Sequence
  Synthetic: FXN 3 reverse 9:69045066-69045089; SpCas9
agcatttccatcacatcagg

SEQ ID NO: 43651 - DNA, 19 bp, Artificial Sequence
  Synthetic: FXN 3 reverse 9:69045067-69045089; SpCas9
gcatttccatcacatcagg

SEQ ID NO: 43652 - DNA, 18 bp, Artificial Sequence
  Synthetic: FXN 3 reverse 9:69045068-69045089; SpCas9
catttccatcacatcagg

SEQ ID NO: 43653 - DNA, 25 bp, Artificial Sequence
  Synthetic: FXN 3 reverse 9:69045064-69045092; SpCas9
gcagacacagcatttccatcacatc

SEQ ID NO: 43654 - DNA, 24 bp, Artificial Sequence
  Synthetic: FXN 3 reverse 9:69045065-69045092; SpCas9
cagacacagcatttccatcacatc

SEQ ID NO: 43655 - DNA, 23 bp, Artificial Sequence
  Synthetic: FXN 3 reverse 9:69045066-69045092; SpCas9
agacacagcatttccatcacatc

SEQ ID NO: 43656 - DNA, 22 bp, Artificial Sequence
  Synthetic: FXN 3 reverse 9:69045067-69045092; SpCas9
gacacagcatttccatcacatc

SEQ ID NO: 43657 - DNA, 21 bp, Artificial Sequence
  Synthetic: FXN 3 reverse 9:69045068-69045092; SpCas9
acacagcatttccatcacatc

SEQ ID NO: 43658 - DNA, 20 bp, Artificial Sequence
  Synthetic: FXN 3 reverse 9:69045069-69045092; SpCas9
cacagcatttccatcacatc

SEQ ID NO: 43659 - DNA, 19 bp, Artificial Sequence
  Synthetic: FXN 3 reverse 9:69045070-69045092; SpCas9
acagcatttccatcacatc

SEQ ID NO: 43660 - DNA, 18 bp, Artificial Sequence
  Synthetic: FXN 3 reverse 9:69045071-69045092; SpCas9
cagcatttccatcacatc

SEQ ID NO: 43661 - DNA, 25 bp, Artificial Sequence
  Synthetic: FXN 3 reverse 9:69045065-69045093; SpCas9
tgcagacacagcatttccatcacat

SEQ ID NO: 43662 - DNA, 24 bp, Artificial Sequence
  Synthetic: FXN 3 reverse 9:69045066-69045093; SpCas9
gcagacacagcatttccatcacat

SEQ ID NO: 43663 - DNA, 23 bp, Artificial Sequence
  Synthetic: FXN 3 reverse 9:69045067-69045093; SpCas9
cagacacagcatttccatcacat

SEQ ID NO: 43664 - DNA, 22 bp, Artificial Sequence
  Synthetic: FXN 3 reverse 9:69045068-69045093; SpCas9
agacacagcatttccatcacat

SEQ ID NO: 43665 - DNA, 21 bp, Artificial Sequence
  Synthetic: FXN 3 reverse 9:69045069-69045093; SpCas9
gacacagcatttccatcacat

SEQ ID NO: 43666 - DNA, 20 bp, Artificial Sequence
  Synthetic: FXN 3 reverse 9:69045070-69045093; SpCas9
acacagcatttccatcacat

SEQ ID NO: 43667 - DNA, 19 bp, Artificial Sequence
  Synthetic: FXN 3 reverse 9:69045071-69045093; SpCas9
cacagcatttccatcacat

SEQ ID NO: 43668 - DNA, 18 bp, Artificial Sequence
  Synthetic: FXN 3 reverse 9:69045072-69045093; SpCas9
acagcatttccatcacat

SEQ ID NO: 43669 - DNA, 25 bp, Artificial Sequence
  Synthetic: FXN 3 forward 9:69045072-69045100; SpCas9
gatggaaatgctgtgtctgcaccac

SEQ ID NO: 43670 - DNA, 24 bp, Artificial Sequence
  Synthetic: FXN 3 forward 9:69045073-69045100; SpCas9
atggaaatgctgtgtctgcaccac

SEQ ID NO: 43671 - DNA, 23 bp, Artificial Sequence
  Synthetic: FXN 3 forward 9:69045074-69045100; SpCas9
tggaaatgctgtgtctgcaccac

SEQ ID NO: 43672 - DNA, 22 bp, Artificial Sequence
  Synthetic: FXN 3 forward 9:69045075-69045100; SpCas9
ggaaatgctgtgtctgcaccac

SEQ ID NO: 43673 - DNA, 21 bp, Artificial Sequence
  Synthetic: FXN 3 forward 9:69045076-69045100; SpCas9
gaaatgctgtgtctgcaccac

SEQ ID NO: 43674 - DNA, 20 bp, Artificial Sequence
  Synthetic: FXN 3 forward 9:69045077-69045100; SpCas9
aaatgctgtgtctgcaccac

SEQ ID NO: 43675 - DNA, 19 bp, Artificial Sequence
  Synthetic: FXN 3 forward 9:69045078-69045100; SpCas9
aatgctgtgtctgcaccac

SEQ ID NO: 43676 - DNA, 18 bp, Artificial Sequence
  Synthetic: FXN 3 forward 9:69045079-69045100; SpCas9
atgctgtgtctgcaccac

SEQ ID NO: 43677 - DNA, 25 bp, Artificial Sequence
  Synthetic: FXN 3 forward 9:69045082-69045110; SpCas9
ctgtgtctgcaccactagccacatg

SEQ ID NO: 43678 - DNA, 24 bp, Artificial Sequence
  Synthetic: FXN 3 forward 9:69045083-69045110; SpCas9
tgtgtctgcaccactagccacatg

SEQ ID NO: 43679 - DNA, 23 bp, Artificial Sequence
  Synthetic: FXN 3 forward 9:69045084-69045110; SpCas9
gtgtctgcaccactagccacatg

SEQ ID NO: 43680 - DNA, 22 bp, Artificial Sequence
  Synthetic: FXN 3 forward 9:69045085-69045110; SpCas9
tgtctgcaccactagccacatg

SEQ ID NO: 43681 - DNA, 21 bp, Artificial Sequence
  Synthetic: FXN 3 forward 9:69045086-69045110; SpCas9
gtctgcaccactagccacatg

SEQ ID NO: 43682 - DNA, 20 bp, Artificial Sequence
  Synthetic: FXN 3 forward 9:69045087-69045110; SpCas9
tctgcaccactagccacatg

SEQ ID NO: 43683 - DNA, 19 bp, Artificial Sequence
  Synthetic: FXN 3 forward 9:69045088-69045110; SpCas9
ctgcaccactagccacatg

SEQ ID NO: 43684 - DNA, 18 bp, Artificial Sequence
  Synthetic: FXN 3 forward 9:69045089-69045110; SpCas9
tgcaccactagccacatg

SEQ ID NO: 43685 - DNA, 25 bp, Artificial Sequence
  Synthetic: FXN 3 reverse 9:69045082-69045110; SpCas9
ccacatgtggctagtggtgcagaca

SEQ ID NO: 43686 - DNA, 24 bp, Artificial Sequence
  Synthetic: FXN 3 reverse 9:69045083-69045110; SpCas9
cacatgtggctagtggtgcagaca

SEQ ID NO: 43687 - DNA, 23 bp, Artificial Sequence
  Synthetic: FXN 3 reverse 9:69045084-69045110; SpCas9
acatgtggctagtggtgcagaca

SEQ ID NO: 43688 - DNA, 22 bp, Artificial Sequence
  Synthetic: FXN 3 reverse 9:69045085-69045110; SpCas9
catgtggctagtggtgcagaca

SEQ ID NO: 43689 - DNA, 21 bp, Artificial Sequence
  Synthetic: FXN 3 reverse 9:69045086-69045110; SpCas9
atgtggctagtggtgcagaca

SEQ ID NO: 43690 - DNA, 20 bp, Artificial Sequence
  Synthetic: FXN 3 reverse 9:69045087-69045110; SpCas9
tgtggctagtggtgcagaca

SEQ ID NO: 43691 - DNA, 19 bp, Artificial Sequence
  Synthetic: FXN 3 reverse 9:69045088-69045110; SpCas9
gtggctagtggtgcagaca

SEQ ID NO: 43692 - DNA, 18 bp, Artificial Sequence
  Synthetic: FXN 3 reverse 9:69045089-69045110; SpCas9
tggctagtggtgcagaca

SEQ ID NO: 43693 - DNA, 25 bp, Artificial Sequence
  Synthetic: FXN 3 forward 9:69045088-69045116; SpCas9
ctgcaccactagccacatgtggcca

SEQ ID NO: 43694 - DNA, 24 bp, Artificial Sequence
  Synthetic: FXN 3 forward 9:69045089-69045116; SpCas9
tgcaccactagccacatgtggcca

SEQ ID NO: 43695 - DNA, 23 bp, Artificial Sequence
  Synthetic: FXN 3 forward 9:69045090-69045116; SpCas9
gcaccactagccacatgtggcca

SEQ ID NO: 43696 - DNA, 22 bp, Artificial Sequence
  Synthetic: FXN 3 forward 9:69045091-69045116; SpCas9
caccactagccacatgtggcca

SEQ ID NO: 43697 - DNA, 21 bp, Artificial Sequence
  Synthetic: FXN 3 forward 9:69045092-69045116; SpCas9
accactagccacatgtggcca

SEQ ID NO: 43698 - DNA, 20 bp, Artificial Sequence
  Synthetic: FXN 3 forward 9:69045093-69045116; SpCas9
ccactagccacatgtggcca

SEQ ID NO: 43699 - DNA, 19 bp, Artificial Sequence
  Synthetic: FXN 3 forward 9:69045094-69045116; SpCas9
cactagccacatgtggcca

SEQ ID NO: 43700 - DNA, 18 bp, Artificial Sequence
  Synthetic: FXN 3 forward 9:69045095-69045116; SpCas9
actagccacatgtggcca

SEQ ID NO: 43701 - DNA, 25 bp, Artificial Sequence
  Synthetic: FXN 3 reverse 9:69045088-69045116; SpCas9
ctgtggccacatgtggctagtggtg

SEQ ID NO: 43702 - DNA, 24 bp, Artificial Sequence
  Synthetic: FXN 3 reverse 9:69045089-69045116; SpCas9
tgtggccacatgtggctagtggtg

SEQ ID NO: 43703 - DNA, 23 bp, Artificial Sequence
  Synthetic: FXN 3 reverse 9:69045090-69045116; SpCas9
gtggccacatgtggctagtggtg

SEQ ID NO: 43704 - DNA, 22 bp, Artificial Sequence
  Synthetic: FXN 3 reverse 9:69045091-69045116; SpCas9
tggccacatgtggctagtggtg

SEQ ID NO: 43705 - DNA, 21 bp, Artificial Sequence
  Synthetic: FXN 3 reverse 9:69045092-69045116; SpCas9
ggccacatgtggctagtggtg

SEQ ID NO: 43706 - DNA, 20 bp, Artificial Sequence
  Synthetic: FXN 3 reverse 9:69045093-69045116; SpCas9
gccacatgtggctagtggtg

SEQ ID NO: 43707 - DNA, 19 bp, Artificial Sequence
  Synthetic: FXN 3 reverse 9:69045094-69045116; SpCas9
ccacatgtggctagtggtg

SEQ ID NO: 43708 - DNA, 18 bp, Artificial Sequence
  Synthetic: FXN 3 reverse 9:69045095-69045116; SpCas9
cacatgtggctagtggtg

SEQ ID NO: 43709 - DNA, 25 bp, Artificial Sequence
  Synthetic: FXN 3 forward 9:69045089-69045117; SpCas9
tgcaccactagccacatgtggccac

SEQ ID NO: 43710 - DNA, 24 bp, Artificial Sequence
  Synthetic: FXN 3 forward 9:69045090-69045117; SpCas9
gcaccactagccacatgtggccac

SEQ ID NO: 43711 - DNA, 23 bp, Artificial Sequence
  Synthetic: FXN 3 forward 9:69045091-69045117; SpCas9
caccactagccacatgtggccac

SEQ ID NO: 43712 - DNA, 22 bp, Artificial Sequence
  Synthetic: FXN 3 forward 9:69045092-69045117; SpCas9
accactagccacatgtggccac

SEQ ID NO: 43713 - DNA, 21 bp, Artificial Sequence
  Synthetic: FXN 3 forward 9:69045093-69045117; SpCas9
ccactagccacatgtggccac

SEQ ID NO: 43714 - DNA, 20 bp, Artificial Sequence
  Synthetic: FXN 3 forward 9:69045094-69045117; SpCas9
cactagccacatgtggccac

SEQ ID NO: 43715 - DNA, 19 bp, Artificial Sequence
  Synthetic: FXN 3 forward 9:69045095-69045117; SpCas9
actagccacatgtggccac

SEQ ID NO: 43716 - DNA, 18 bp, Artificial Sequence
  Synthetic: FXN 3 forward 9:69045096-69045117; SpCas9
ctagccacatgtggccac

SEQ ID NO: 43717 - DNA, 25 bp, Artificial Sequence
  Synthetic: FXN 3 reverse 9:69045093-69045121; SpCas9
gaatcctgtggccacatgtggctag

SEQ ID NO: 43718 - DNA, 24 bp, Artificial Sequence
  Synthetic: FXN 3 reverse 9:69045094-69045121; SpCas9
aatcctgtggccacatgtggctag

SEQ ID NO: 43719 - DNA, 23 bp, Artificial Sequence
  Synthetic: FXN 3 reverse 9:69045095-69045121; SpCas9
atcctgtggccacatgtggctag

SEQ ID NO: 43720 - DNA, 22 bp, Artificial Sequence
  Synthetic: FXN 3 reverse 9:69045096-69045121; SpCas9
tcctgtggccacatgtggctag

SEQ ID NO: 43721 - DNA, 21 bp, Artificial Sequence
  Synthetic: FXN 3 reverse 9:69045097-69045121; SpCas9
cctgtggccacatgtggctag

SEQ ID NO: 43722 - DNA, 20 bp, Artificial Sequence
  Synthetic: FXN 3 reverse 9:69045098-69045121; SpCas9
ctgtggccacatgtggctag

SEQ ID NO: 43723 - DNA, 19 bp, Artificial Sequence
  Synthetic: FXN 3 reverse 9:69045099-69045121; SpCas9
tgtggccacatgtggctag

SEQ ID NO: 43724 - DNA, 18 bp, Artificial Sequence
  Synthetic: FXN 3 reverse 9:69045100-69045121; SpCas9
gtggccacatgtggctag

SEQ ID NO: 43725 - DNA, 25 bp, Artificial Sequence
  Synthetic: FXN 3 reverse 9:69045096-69045124; SpCas9
cgagaatcctgtggccacatgtggc

SEQ ID NO: 43726 - DNA, 24 bp, Artificial Sequence
  Synthetic: FXN 3 reverse 9:69045097-69045124; SpCas9
gagaatcctgtggccacatgtggc

SEQ ID NO: 43727 - DNA, 23 bp, Artificial Sequence
  Synthetic: FXN 3 reverse 9:69045098-69045124; SpCas9
agaatcctgtggccacatgtggc

SEQ ID NO: 43728 - DNA, 22 bp, Artificial Sequence
  Synthetic: FXN 3 reverse 9:69045099-69045124; SpCas9
gaatcctgtggccacatgtggc

SEQ ID NO: 43729 - DNA, 21 bp, Artificial Sequence
  Synthetic: FXN 3 reverse 9:69045100-69045124; SpCas9
aatcctgtggccacatgtggc

SEQ ID NO: 43730 - DNA, 20 bp, Artificial Sequence
  Synthetic: FXN 3 reverse 9:69045101-69045124; SpCas9
atcctgtggccacatgtggc

SEQ ID NO: 43731 - DNA, 19 bp, Artificial Sequence
  Synthetic: FXN 3 reverse 9:69045102-69045124; SpCas9
tcctgtggccacatgtggc

SEQ ID NO: 43732 - DNA, 18 bp, Artificial Sequence
  Synthetic: FXN 3 reverse 9:69045103-69045124; SpCas9
cctgtggccacatgtggc

SEQ ID NO: 43733 - DNA, 25 bp, Artificial Sequence
  Synthetic: FXN 3 reverse 9:69045100-69045128; SpCas9
gtttcgagaatcctgtggccacatg

SEQ ID NO: 43734 - DNA, 24 bp, Artificial Sequence
  Synthetic: FXN 3 reverse 9:69045101-69045128; SpCas9
tttcgagaatcctgtggccacatg

SEQ ID NO: 43735 - DNA, 23 bp, Artificial Sequence
  Synthetic: FXN 3 reverse 9:69045102-69045128; SpCas9
ttcgagaatcctgtggccacatg

SEQ ID NO: 43736 - DNA, 22 bp, Artificial Sequence
  Synthetic: FXN 3 reverse 9:69045103-69045128; SpCas9
tcgagaatcctgtggccacatg

SEQ ID NO: 43737 - DNA, 21 bp, Artificial Sequence
  Synthetic: FXN 3 reverse 9:69045104-69045128; SpCas9
cgagaatcctgtggccacatg

SEQ ID NO: 43738 - DNA, 20 bp, Artificial Sequence
  Synthetic: FXN 3 reverse 9:69045105-69045128; SpCas9
gagaatcctgtggccacatg

SEQ ID NO: 43739 - DNA, 19 bp, Artificial Sequence
  Synthetic: FXN 3 reverse 9:69045106-69045128; SpCas9
agaatcctgtggccacatg

SEQ ID NO: 43740 - DNA, 18 bp, Artificial Sequence
  Synthetic: FXN 3 reverse 9:69045107-69045128; SpCas9
gaatcctgtggccacatg

SEQ ID NO: 43741 - DNA, 25 bp, Artificial Sequence
  Synthetic: FXN 3 forward 9:69045103-69045131; SpCas9
catgtggccacaggattctcgaaac

SEQ ID NO: 43742 - DNA, 24 bp, Artificial Sequence
  Synthetic: FXN 3 forward 9:69045104-69045131; SpCas9
atgtggccacaggattctcgaaac

SEQ ID NO: 43743 - DNA, 23 bp, Artificial Sequence
  Synthetic: FXN 3 forward 9:69045105-69045131; SpCas9
tgtggccacaggattctcgaaac

SEQ ID NO: 43744 - DNA, 22 bp, Artificial Sequence
  Synthetic: FXN 3 forward 9:69045106-69045131; SpCas9
gtggccacaggattctcgaaac

SEQ ID NO: 43745 - DNA, 21 bp, Artificial Sequence
  Synthetic: FXN 3 forward 9:69045107-69045131; SpCas9
tggccacaggattctcgaaac

SEQ ID NO: 43746 - DNA, 20 bp, Artificial Sequence
  Synthetic: FXN 3 forward 9:69045108-69045131; SpCas9
ggccacaggattctcgaaac

SEQ ID NO: 43747 - DNA, 19 bp, Artificial Sequence
  Synthetic: FXN 3 forward 9:69045109-69045131; SpCas9
gccacaggattctcgaaac

SEQ ID NO: 43748 - DNA, 18 bp, Artificial Sequence
  Synthetic: FXN 3 forward 9:69045110-69045131; SpCas9
ccacaggattctcgaaac

SEQ ID NO: 43749 - DNA, 25 bp, Artificial Sequence
  Synthetic: FXN 3 forward 9:69045106-69045134; SpCas9
gtggccacaggattctcgaaactgg

SEQ ID NO: 43750 - DNA, 24 bp, Artificial Sequence
  Synthetic: FXN 3 forward 9:69045107-69045134; SpCas9
tggccacaggattctcgaaactgg

SEQ ID NO: 43751 - DNA, 23 bp, Artificial Sequence
  Synthetic: FXN 3 forward 9:69045108-69045134; SpCas9
ggccacaggattctcgaaactgg

SEQ ID NO: 43752 - DNA, 22 bp, Artificial Sequence
  Synthetic: FXN 3 forward 9:69045109-69045134; SpCas9
gccacaggattctcgaaactgg

SEQ ID NO: 43753 - DNA, 21 bp, Artificial Sequence
  Synthetic: FXN 3 forward 9:69045110-69045134; SpCas9
ccacaggattctcgaaactgg

SEQ ID NO: 43754 - DNA, 20 bp, Artificial Sequence
  Synthetic: FXN 3 forward 9:69045111-69045134; SpCas9
cacaggattctcgaaactgg

SEQ ID NO: 43755 - DNA, 19 bp, Artificial Sequence
  Synthetic: FXN 3 forward 9:69045112-69045134; SpCas9
acaggattctcgaaactgg

SEQ ID NO: 43756 - DNA, 18 bp, Artificial Sequence
  Synthetic: FXN 3 forward 9:69045113-69045134; SpCas9
caggattctcgaaactgg

SEQ ID NO: 43757 - DNA, 25 bp, Artificial Sequence
  Synthetic: FXN 3 reverse 9:69045110-69045138; SpCas9
tgcaccaccagtttcgagaatcctg

SEQ ID NO: 43758 - DNA, 24 bp, Artificial Sequence
  Synthetic: FXN 3 reverse 9:69045111-69045138; SpCas9
gcaccaccagtttcgagaatcctg

SEQ ID NO: 43759 - DNA, 23 bp, Artificial Sequence
  Synthetic: FXN 3 reverse 9:69045112-69045138; SpCas9
caccaccagtttcgagaatcctg

SEQ ID NO: 43760 - DNA, 22 bp, Artificial Sequence
  Synthetic: FXN 3 reverse 9:69045113-69045138; SpCas9
accaccagtttcgagaatcctg

SEQ ID NO: 43761 - DNA, 21 bp, Artificial Sequence
  Synthetic: FXN 3 reverse 9:69045114-69045138; SpCas9
ccaccagtttcgagaatcctg

SEQ ID NO: 43762 - DNA, 20 bp, Artificial Sequence
  Synthetic: FXN 3 reverse 9:69045115-69045138; SpCas9
caccagtttcgagaatcctg

SEQ ID NO: 43763 - DNA, 19 bp, Artificial Sequence
  Synthetic: FXN 3 reverse 9:69045116-69045138; SpCas9
accagtttcgagaatcctg

SEQ ID NO: 43764 - DNA, 18 bp, Artificial Sequence
  Synthetic: FXN 3 reverse 9:69045117-69045138; SpCas9
ccagtttcgagaatcctg

SEQ ID NO: 43765 - DNA, 25 bp, Artificial Sequence
  Synthetic: FXN 3 forward 9:69045111-69045139; SpCas9
cacaggattctcgaaactggtggtg

SEQ ID NO: 43766 - DNA, 24 bp, Artificial Sequence
  Synthetic: FXN 3 forward 9:69045112-69045139; SpCas9
acaggattctcgaaactggtggtg

SEQ ID NO: 43767 - DNA, 23 bp, Artificial Sequence
  Synthetic: FXN 3 forward 9:69045113-69045139; SpCas9
caggattctcgaaactggtggtg

SEQ ID NO: 43768 - DNA, 22 bp, Artificial Sequence
  Synthetic: FXN 3 forward 9:69045114-69045139; SpCas9
aggattctcgaaactggtggtg

SEQ ID NO: 43769 - DNA, 21 bp, Artificial Sequence
  Synthetic: FXN 3 forward 9:69045115-69045139; SpCas9
ggattctcgaaactggtggtg

SEQ ID NO: 43770 - DNA, 20 bp, Artificial Sequence
  Synthetic: FXN 3 forward 9:69045116-69045139; SpCas9
gattctcgaaactggtggtg

SEQ ID NO: 43771 - DNA, 19 bp, Artificial Sequence
  Synthetic: FXN 3 forward 9:69045117-69045139; SpCas9
attctcgaaactggtggtg

SEQ ID NO: 43772 - DNA, 18 bp, Artificial Sequence
  Synthetic: FXN 3 forward 9:69045118-69045139; SpCas9
ttctcgaaactggtggtg

SEQ ID NO: 43773 - DNA, 25 bp, Artificial Sequence
  Synthetic: FXN 3 forward 9:69045116-69045144; SpCas9
gattctcgaaactggtggtgcagtt

SEQ ID NO: 43774 - DNA, 24 bp, Artificial Sequence
  Synthetic: FXN 3 forward 9:69045117-69045144; SpCas9
attctcgaaactggtggtgcagtt

SEQ ID NO: 43775 - DNA, 23 bp, Artificial Sequence
  Synthetic: FXN 3 forward 9:69045118-69045144; SpCas9
ttctcgaaactggtggtgcagtt

SEQ ID NO: 43776 - DNA, 22 bp, Artificial Sequence
  Synthetic: FXN 3 forward 9:69045119-69045144; SpCas9
tctcgaaactggtggtgcagtt

SEQ ID NO: 43777 - DNA, 21 bp, Artificial Sequence
  Synthetic: FXN 3 forward 9:69045120-69045144; SpCas9
ctcgaaactggtggtgcagtt

SEQ ID NO: 43778 - DNA, 20 bp, Artificial Sequence
  Synthetic: FXN 3 forward 9:69045121-69045144; SpCas9
tcgaaactggtggtgcagtt

SEQ ID NO: 43779 - DNA, 19 bp, Artificial Sequence
  Synthetic: FXN 3 forward 9:69045122-69045144; SpCas9
cgaaactggtggtgcagtt

SEQ ID NO: 43780 - DNA, 18 bp, Artificial Sequence
  Synthetic: FXN 3 forward 9:69045123-69045144; SpCas9
gaaactggtggtgcagtt

SEQ ID NO: 43781 - DNA, 25 bp, Artificial Sequence
  Synthetic: FXN 3 forward 9:69045117-69045145; SpCas9
attctcgaaactggtggtgcagttg

SEQ ID NO: 43782 - DNA, 24 bp, Artificial Sequence
  Synthetic: FXN 3 forward 9:69045118-69045145; SpCas9
ttctcgaaactggtggtgcagttg

SEQ ID NO: 43783 - DNA, 23 bp, Artificial Sequence
  Synthetic: FXN 3 forward 9:69045119-69045145; SpCas9
tctcgaaactggtggtgcagttg

SEQ ID NO: 43784 - DNA, 22 bp, Artificial Sequence
  Synthetic: FXN 3 forward 9:69045120-69045145; SpCas9
ctcgaaactggtggtgcagttg

SEQ ID NO: 43785 - DNA, 21 bp, Artificial Sequence
  Synthetic: FXN 3 forward 9:69045121-69045145; SpCas9
tcgaaactggtggtgcagttg

SEQ ID NO: 43786 - DNA, 20 bp, Artificial Sequence
  Synthetic: FXN 3 forward 9:69045122-69045145; SpCas9
cgaaactggtggtgcagttg

SEQ ID NO: 43787 - DNA, 19 bp, Artificial Sequence
  Synthetic: FXN 3 forward 9:69045123-69045145; SpCas9
gaaactggtggtgcagttg

SEQ ID NO: 43788 - DNA, 18 bp, Artificial Sequence
  Synthetic: FXN 3 forward 9:69045124-69045145; SpCas9
aaactggtggtgcagttg

SEQ ID NO: 43789 - DNA, 25 bp, Artificial Sequence
  Synthetic: FXN 3 forward 9:69045119-69045147; SpCas9
tctcgaaactggtggtgcagttgag

SEQ ID NO: 43790 - DNA, 24 bp, Artificial Sequence
  Synthetic: FXN 3 forward 9:69045120-69045147; SpCas9
ctcgaaactggtggtgcagttgag

SEQ ID NO: 43791 - DNA, 23 bp, Artificial Sequence
  Synthetic: FXN 3 forward 9:69045121-69045147; SpCas9
tcgaaactggtggtgcagttgag

SEQ ID NO: 43792 - DNA, 22 bp, Artificial Sequence
  Synthetic: FXN 3 forward 9:69045122-69045147; SpCas9
cgaaactggtggtgcagttgag

SEQ ID NO: 43793 - DNA, 21 bp, Artificial Sequence
  Synthetic: FXN 3 forward 9:69045123-69045147; SpCas9
gaaactggtggtgcagttgag

SEQ ID NO: 43794 - DNA, 20 bp, Artificial Sequence
  Synthetic: FXN 3 forward 9:69045124-69045147; SpCas9
aaactggtggtgcagttgag

SEQ ID NO: 43795 - DNA, 19 bp, Artificial Sequence
  Synthetic: FXN 3 forward 9:69045125-69045147; SpCas9
aactggtggtgcagttgag

SEQ ID NO: 43796 - DNA, 18 bp, Artificial Sequence
  Synthetic: FXN 3 forward 9:69045126-69045147; SpCas9
actggtggtgcagttgag

SEQ ID NO: 43797 - DNA, 25 bp, Artificial Sequence
  Synthetic: FXN 3 reverse 9:69045120-69045148; SpCas9
gctcctcaactgcaccaccagtttc

SEQ ID NO: 43798 - DNA, 24 bp, Artificial Sequence
  Synthetic: FXN 3 reverse 9:69045121-69045148; SpCas9
ctcctcaactgcaccaccagtttc

SEQ ID NO: 43799 - DNA, 23 bp, Artificial Sequence
  Synthetic: FXN 3 reverse 9:69045122-69045148; SpCas9
tcctcaactgcaccaccagtttc

SEQ ID NO: 43800 - DNA, 22 bp, Artificial Sequence
  Synthetic: FXN 3 reverse 9:69045123-69045148; SpCas9
cctcaactgcaccaccagtttc

SEQ ID NO: 43801 - DNA, 21 bp, Artificial Sequence
  Synthetic: FXN 3 reverse 9:69045124-69045148; SpCas9
ctcaactgcaccaccagtttc

SEQ ID NO: 43802 - DNA, 20 bp, Artificial Sequence
  Synthetic: FXN 3 reverse 9:69045125-69045148; SpCas9
tcaactgcaccaccagtttc

SEQ ID NO: 43803 - DNA, 19 bp, Artificial Sequence
  Synthetic: FXN 3 reverse 9:69045126-69045148; SpCas9
caactgcaccaccagtttc

SEQ ID NO: 43804 - DNA, 18 bp, Artificial Sequence
  Synthetic: FXN 3 reverse 9:69045127-69045148; SpCas9
aactgcaccaccagtttc

SEQ ID NO: 43805 - DNA, 25 bp, Artificial Sequence
  Synthetic: FXN 3 reverse 9:69045127-69045155; SpCas9
aaagtcagctcctcaactgcaccac

SEQ ID NO: 43806 - DNA, 24 bp, Artificial Sequence
  Synthetic: FXN 3 reverse 9:69045128-69045155; SpCas9
aagtcagctcctcaactgcaccac

SEQ ID NO: 43807 - DNA, 23 bp, Artificial Sequence
  Synthetic: FXN 3 reverse 9:69045129-69045155; SpCas9
agtcagctcctcaactgcaccac

SEQ ID NO: 43808 - DNA, 22 bp, Artificial Sequence
  Synthetic: FXN 3 reverse 9:69045130-69045155; SpCas9
gtcagctcctcaactgcaccac

SEQ ID NO: 43809 - DNA, 21 bp, Artificial Sequence
  Synthetic: FXN 3 reverse 9:69045131-69045155; SpCas9
tcagctcctcaactgcaccac

SEQ ID NO: 43810 - DNA, 20 bp, Artificial Sequence
  Synthetic: FXN 3 reverse 9:69045132-69045155; SpCas9
cagctcctcaactgcaccac

SEQ ID NO: 43811 - DNA, 19 bp, Artificial Sequence
  Synthetic: FXN 3 reverse 9:69045133-69045155; SpCas9
agctcctcaactgcaccac

SEQ ID NO: 43812 - DNA, 18 bp, Artificial Sequence
  Synthetic: FXN 3 reverse 9:69045134-69045155; SpCas9
gctcctcaactgcaccac

SEQ ID NO: 43813 - DNA, 25 bp, Artificial Sequence
  Synthetic: FXN 3 reverse 9:69045147-69045175; SpCas9
aatttaatgagataaaatataaagt

SEQ ID NO: 43814 - DNA, 24 bp, Artificial Sequence
  Synthetic: FXN 3 reverse 9:69045148-69045175; SpCas9
atttaatgagataaaatataaagt

SEQ ID NO: 43815 - DNA, 23 bp, Artificial Sequence
  Synthetic: FXN 3 reverse 9:69045149-69045175; SpCas9
tttaatgagataaaatataaagt

SEQ ID NO: 43816 - DNA, 22 bp, Artificial Sequence
  Synthetic: FXN 3 reverse 9:69045150-69045175; SpCas9
ttaatgagataaaatataaagt

SEQ ID NO: 43817 - DNA, 21 bp, Artificial Sequence
  Synthetic: FXN 3 reverse 9:69045151-69045175; SpCas9
taatgagataaaatataaagt

SEQ ID NO: 43818 - DNA, 20 bp, Artificial Sequence
  Synthetic: FXN 3 reverse 9:69045152-69045175; SpCas9
aatgagataaaatataaagt

SEQ ID NO: 43819 - DNA, 19 bp, Artificial Sequence
  Synthetic: FXN 3 reverse 9:69045153-69045175; SpCas9
atgagataaaatataaagt

SEQ ID NO: 43820 - DNA, 18 bp, Artificial Sequence
  Synthetic: FXN 3 reverse 9:69045154-69045175; SpCas9
tgagataaaatataaagt

SEQ ID NO: 43821 - DNA, 25 bp, Artificial Sequence
  Synthetic: FXN 3 reverse 9:69045151-69045179; SpCas9
tttaaatttaatgagataaaatata

SEQ ID NO: 43822 - DNA, 24 bp, Artificial Sequence
  Synthetic: FXN 3 reverse 9:69045152-69045179; SpCas9
ttaaatttaatgagataaaatata

SEQ ID NO: 43823 - DNA, 23 bp, Artificial Sequence
  Synthetic: FXN 3 reverse 9:69045153-69045179; SpCas9
taaatttaatgagataaaatata

SEQ ID NO: 43824 - DNA, 22 bp, Artificial Sequence
  Synthetic: FXN 3 reverse 9:69045154-69045179; SpCas9
aaatttaatgagataaaatata

SEQ ID NO: 43825 - DNA, 21 bp, Artificial Sequence
  Synthetic: FXN 3 reverse 9:69045155-69045179; SpCas9
aatttaatgagataaaatata

SEQ ID NO: 43826 - DNA, 20 bp, Artificial Sequence
  Synthetic: FXN 3 reverse 9:69045156-69045179; SpCas9
atttaatgagataaaatata

SEQ ID NO: 43827 - DNA, 19 bp, Artificial Sequence
  Synthetic: FXN 3 reverse 9:69045157-69045179; SpCas9
tttaatgagataaaatata

SEQ ID NO: 43828 - DNA, 18 bp, Artificial Sequence
  Synthetic: FXN 3 reverse 9:69045158-69045179; SpCas9
ttaatgagataaaatata

SEQ ID NO: 43829 - DNA, 25 bp, Artificial Sequence
  Synthetic: FXN 3 forward 9:69045160-69045188; SpCas9
ttatctcattaaatttaaatgtaaa

SEQ ID NO: 43830 - DNA, 24 bp, Artificial Sequence
  Synthetic: FXN 3 forward 9:69045161-69045188; SpCas9
tatctcattaaatttaaatgtaaa

SEQ ID NO: 43831 - DNA, 23 bp, Artificial Sequence
  Synthetic: FXN 3 forward 9:69045162-69045188; SpCas9
atctcattaaatttaaatgtaaa

SEQ ID NO: 43832 - DNA, 22 bp, Artificial Sequence
  Synthetic: FXN 3 forward 9:69045163-69045188; SpCas9
tctcattaaatttaaatgtaaa

SEQ ID NO: 43833 - DNA, 21 bp, Artificial Sequence
  Synthetic: FXN 3 forward 9:69045164-69045188; SpCas9
ctcattaaatttaaatgtaaa

SEQ ID NO: 43834 - DNA, 20 bp, Artificial Sequence
  Synthetic: FXN 3 forward 9:69045165-69045188; SpCas9
tcattaaatttaaatgtaaa

SEQ ID NO: 43835 - DNA, 19 bp, Artificial Sequence
  Synthetic: FXN 3 forward 9:69045166-69045188; SpCas9
cattaaatttaaatgtaaa

SEQ ID NO: 43836 - DNA, 18 bp, Artificial Sequence
  Synthetic: FXN 3 forward 9:69045167-69045188; SpCas9
attaaatttaaatgtaaa

SEQ ID NO: 43837 - DNA, 25 bp, Artificial Sequence
  Synthetic: FXN 3 reverse 9:69045164-69045192; SpCas9
gtagctatttacatttaaatttaat

SEQ ID NO: 43838 - DNA, 24 bp, Artificial Sequence
  Synthetic: FXN 3 reverse 9:69045165-69045192; SpCas9
tagctatttacatttaaatttaat

SEQ ID NO: 43839 - DNA, 23 bp, Artificial Sequence
  Synthetic: FXN 3 reverse 9:69045166-69045192; SpCas9
agctatttacatttaaatttaat

SEQ ID NO: 43840 - DNA, 22 bp, Artificial Sequence
  Synthetic: FXN 3 reverse 9:69045167-69045192; SpCas9
gctatttacatttaaatttaat

SEQ ID NO: 43841 - DNA, 21 bp, Artificial Sequence
  Synthetic: FXN 3 reverse 9:69045168-69045192; SpCas9
ctatttacatttaaatttaat

SEQ ID NO: 43842 - DNA, 20 bp, Artificial Sequence
  Synthetic: FXN 3 reverse 9:69045169-69045192; SpCas9
tatttacatttaaatttaat

SEQ ID NO: 43843 - DNA, 19 bp, Artificial Sequence
  Synthetic: FXN 3 reverse 9:69045170-69045192; SpCas9
atttacatttaaatttaat

SEQ ID NO: 43844 - DNA, 18 bp, Artificial Sequence
  Synthetic: FXN 3 reverse 9:69045171-69045192; SpCas9
tttacatttaaatttaat

SEQ ID NO: 43845 - DNA, 25 bp, Artificial Sequence
  Synthetic: FXN 3 forward 9:69045170-69045198; SpCas9
aaatttaaatgtaaatagctacgtg

SEQ ID NO: 43846 - DNA, 24 bp, Artificial Sequence
  Synthetic: FXN 3 forward 9:69045171-69045198; SpCas9
aatttaaatgtaaatagctacgtg

SEQ ID NO: 43847 - DNA, 23 bp, Artificial Sequence
  Synthetic: FXN 3 forward 9:69045172-69045198; SpCas9
atttaaatgtaaatagctacgtg

SEQ ID NO: 43848 - DNA, 22 bp, Artificial Sequence
  Synthetic: FXN 3 forward 9:69045173-69045198; SpCas9
tttaaatgtaaatagctacgtg

SEQ ID NO: 43849 - DNA, 21 bp, Artificial Sequence
  Synthetic: FXN 3 forward 9:69045174-69045198; SpCas9
ttaaatgtaaatagctacgtg

SEQ ID NO: 43850 - DNA, 20 bp, Artificial Sequence
  Synthetic: FXN 3 forward 9:69045175-69045198; SpCas9
taaatgtaaatagctacgtg

SEQ ID NO: 43851 - DNA, 19 bp, Artificial Sequence
  Synthetic: FXN 3 forward 9:69045176-69045198; SpCas9
aaatgtaaatagctacgtg

SEQ ID NO: 43852 - DNA, 18 bp, Artificial Sequence
  Synthetic: FXN 3 forward 9:69045177-69045198; SpCas9
aatgtaaatagctacgtg

SEQ ID NO: 43853 - DNA, 25 bp, Artificial Sequence
  Synthetic: FXN 3 forward 9:69045178-69045206; SpCas9
atgtaaatagctacgtgtggcttgt

SEQ ID NO: 43854 - DNA, 24 bp, Artificial Sequence
  Synthetic: FXN 3 forward 9:69045179-69045206; SpCas9
tgtaaatagctacgtgtggcttgt

SEQ ID NO: 43855 - DNA, 23 bp, Artificial Sequence
  Synthetic: FXN 3 forward 9:69045180-69045206; SpCas9
gtaaatagctacgtgtggcttgt

SEQ ID NO: 43856 - DNA, 22 bp, Artificial Sequence
  Synthetic: FXN 3 forward 9:69045181-69045206; SpCas9
taaatagctacgtgtggcttgt

SEQ ID NO: 43857 - DNA, 21 bp, Artificial Sequence
  Synthetic: FXN 3 forward 9:69045182-69045206; SpCas9
aaatagctacgtgtggcttgt

SEQ ID NO: 43858 - DNA, 20 bp, Artificial Sequence
  Synthetic: FXN 3 forward 9:69045183-69045206; SpCas9
aatagctacgtgtggcttgt

SEQ ID NO: 43859 - DNA, 19 bp, Artificial Sequence
  Synthetic: FXN 3 forward 9:69045184-69045206; SpCas9
atagctacgtgtggcttgt

SEQ ID NO: 43860 - DNA, 18 bp, Artificial Sequence
  Synthetic: FXN 3 forward 9:69045185-69045206; SpCas9
tagctacgtgtggcttgt

SEQ ID NO: 43861 - DNA, 25 bp, Artificial Sequence
  Synthetic: FXN 3 forward 9:69045182-69045210; SpCas9
aaatagctacgtgtggcttgttggc

SEQ ID NO: 43862 - DNA, 24 bp, Artificial Sequence
  Synthetic: FXN 3 forward 9:69045183-69045210; SpCas9
aatagctacgtgtggcttgttggc

SEQ ID NO: 43863 - DNA, 23 bp, Artificial Sequence
  Synthetic: FXN 3 forward 9:69045184-69045210; SpCas9
atagctacgtgtggcttgttggc

SEQ ID NO: 43864 - DNA, 22 bp, Artificial Sequence
  Synthetic: FXN 3 forward 9:69045185-69045210; SpCas9
tagctacgtgtggcttgttggc

SEQ ID NO: 43865 - DNA, 21 bp, Artificial Sequence
  Synthetic: FXN 3 forward 9:69045186-69045210; SpCas9
agctacgtgtggcttgttggc

SEQ ID NO: 43866 - DNA, 20 bp, Artificial Sequence
  Synthetic: FXN 3 forward 9:69045187-69045210; SpCas9
gctacgtgtggcttgttggc

SEQ ID NO: 43867 - DNA, 19 bp, Artificial Sequence
  Synthetic: FXN 3 forward 9:69045188-69045210; SpCas9
ctacgtgtggcttgttggc

SEQ ID NO: 43868 - DNA, 18 bp, Artificial Sequence
  Synthetic: FXN 3 forward 9:69045189-69045210; SpCas9
tacgtgtggcttgttggc

SEQ ID NO: 43869 - DNA, 25 bp, Artificial Sequence
  Synthetic: FXN 3 reverse 9:69045188-69045216; SpCas9
aataggctagccaacaagccacacg

SEQ ID NO: 43870 - DNA, 24 bp, Artificial Sequence
  Synthetic: FXN 3 reverse 9:69045189-69045216; SpCas9
ataggctagccaacaagccacacg

SEQ ID NO: 43871 - DNA, 23 bp, Artificial Sequence
  Synthetic: FXN 3 reverse 9:69045190-69045216; SpCas9
taggctagccaacaagccacacg

SEQ ID NO: 43872 - DNA, 22 bp, Artificial Sequence
  Synthetic: FXN 3 reverse 9:69045191-69045216; SpCas9
aggctagccaacaagccacacg

SEQ ID NO: 43873 - DNA, 21 bp, Artificial Sequence
  Synthetic: FXN 3 reverse 9:69045192-69045216; SpCas9
ggctagccaacaagccacacg

SEQ ID NO: 43874 - DNA, 20 bp, Artificial Sequence
  Synthetic: FXN 3 reverse 9:69045193-69045216; SpCas9
gctagccaacaagccacacg

SEQ ID NO: 43875 - DNA, 19 bp, Artificial Sequence
  Synthetic: FXN 3 reverse 9:69045194-69045216; SpCas9
ctagccaacaagccacacg

SEQ ID NO: 43876 - DNA, 18 bp, Artificial Sequence
  Synthetic: FXN 3 reverse 9:69045195-69045216; SpCas9
tagccaacaagccacacg

SEQ ID NO: 43877 - DNA, 25 bp, Artificial Sequence
  Synthetic: FXN 3 forward 9:69045190-69045218; SpCas9
acgtgtggcttgttggctagcctat

SEQ ID NO: 43878 - DNA, 24 bp, Artificial Sequence
  Synthetic: FXN 3 forward 9:69045191-69045218; SpCas9
cgtgtggcttgttggctagcctat

SEQ ID NO: 43879 - DNA, 23 bp, Artificial Sequence
  Synthetic: FXN 3 forward 9:69045192-69045218; SpCas9
gtgtggcttgttggctagcctat

SEQ ID NO: 43880 - DNA, 22 bp, Artificial Sequence
  Synthetic: FXN 3 forward 9:69045193-69045218; SpCas9
tgtggcttgttggctagcctat

SEQ ID NO: 43881 - DNA, 21 bp, Artificial Sequence
  Synthetic: FXN 3 forward 9:69045194-69045218; SpCas9
gtggcttgttggctagcctat

SEQ ID NO: 43882 - DNA, 20 bp, Artificial Sequence
  Synthetic: FXN 3 forward 9:69045195-69045218; SpCas9
tggcttgttggctagcctat

SEQ ID NO: 43883 - DNA, 19 bp, Artificial Sequence
  Synthetic: FXN 3 forward 9:69045196-69045218; SpCas9
ggcttgttggctagcctat

SEQ ID NO: 43884 - DNA, 18 bp, Artificial Sequence
  Synthetic: FXN 3 forward 9:69045197-69045218; SpCas9
gcttgttggctagcctat

SEQ ID NO: 43885 - DNA, 25 bp, Artificial Sequence
  Synthetic: FXN 3 reverse 9:69045198-69045226; SpCas9
cgtgttttccaataggctagccaac

SEQ ID NO: 43886 - DNA, 24 bp, Artificial Sequence
  Synthetic: FXN 3 reverse 9:69045199-69045226; SpCas9
gtgttttccaataggctagccaac

SEQ ID NO: 43887 - DNA, 23 bp, Artificial Sequence
  Synthetic: FXN 3 reverse 9:69045200-69045226; SpCas9
tgttttccaataggctagccaac

SEQ ID NO: 43888 - DNA, 22 bp, Artificial Sequence
  Synthetic: FXN 3 reverse 9:69045201-69045226; SpCas9
gttttccaataggctagccaac

SEQ ID NO: 43889 - DNA, 21 bp, Artificial Sequence
  Synthetic: FXN 3 reverse 9:69045202-69045226; SpCas9
ttttccaataggctagccaac

SEQ ID NO: 43890 - DNA, 20 bp, Artificial Sequence
  Synthetic: FXN 3 reverse 9:69045203-69045226; SpCas9
tttccaataggctagccaac

SEQ ID NO: 43891 - DNA, 19 bp, Artificial Sequence
  Synthetic: FXN 3 reverse 9:69045204-69045226; SpCas9
ttccaataggctagccaac

SEQ ID NO: 43892 - DNA, 18 bp, Artificial Sequence
  Synthetic: FXN 3 reverse 9:69045205-69045226; SpCas9
tccaataggctagccaac

SEQ ID NO: 43893 - DNA, 25 bp, Artificial Sequence
  Synthetic: FXN 3 forward 9:69045199-69045227; SpCas9
ttgttggctagcctattggaaaaca

SEQ ID NO: 43894 - DNA, 24 bp, Artificial Sequence
  Synthetic: FXN 3 forward 9:69045200-69045227; SpCas9
tgttggctagcctattggaaaaca

SEQ ID NO: 43895 - DNA, 23 bp, Artificial Sequence
  Synthetic: FXN 3 forward 9:69045201-69045227; SpCas9
gttggctagcctattggaaaaca

SEQ ID NO: 43896 - DNA, 22 bp, Artificial Sequence
  Synthetic: FXN 3 forward 9:69045202-69045227; SpCas9
ttggctagcctattggaaaaca

SEQ ID NO: 43897 - DNA, 21 bp, Artificial Sequence
  Synthetic: FXN 3 forward 9:69045203-69045227; SpCas9
tggctagcctattggaaaaca

SEQ ID NO: 43898 - DNA, 20 bp, Artificial Sequence
  Synthetic: FXN 3 forward 9:69045204-69045227; SpCas9
ggctagcctattggaaaaca

SEQ ID NO: 43899 - DNA, 19 bp, Artificial Sequence
  Synthetic: FXN 3 forward 9:69045205-69045227; SpCas9
gctagcctattggaaaaca

SEQ ID NO: 43900 - DNA, 18 bp, Artificial Sequence
  Synthetic: FXN 3 forward 9:69045206-69045227; SpCas9
ctagcctattggaaaaca

SEQ ID NO: 43901 - DNA, 25 bp, Artificial Sequence
  Synthetic: FXN 3 forward 9:69045200-69045228; SpCas9
tgttggctagcctattggaaaacac

SEQ ID NO: 43902 - DNA, 24 bp, Artificial Sequence
  Synthetic: FXN 3 forward 9:69045201-69045228; SpCas9
gttggctagcctattggaaaacac

SEQ ID NO: 43903 - DNA, 23 bp, Artificial Sequence
  Synthetic: FXN 3 forward 9:69045202-69045228; SpCas9
ttggctagcctattggaaaacac

SEQ ID NO: 43904 - DNA, 22 bp, Artificial Sequence
  Synthetic: FXN 3 forward 9:69045203-69045228; SpCas9
tggctagcctattggaaaacac

SEQ ID NO: 43905 - DNA, 21 bp, Artificial Sequence
  Synthetic: FXN 3 forward 9:69045204-69045228; SpCas9
ggctagcctattggaaaacac

SEQ ID NO: 43906 - DNA, 20 bp, Artificial Sequence
  Synthetic: FXN 3 forward 9:69045205-69045228; SpCas9
gctagcctattggaaaacac

SEQ ID NO: 43907 - DNA, 19 bp, Artificial Sequence
  Synthetic: FXN 3 forward 9:69045206-69045228; SpCas9
ctagcctattggaaaacac

SEQ ID NO: 43908 - DNA, 18 bp, Artificial Sequence
  Synthetic: FXN 3 forward 9:69045207-69045228; SpCas9
tagcctattggaaaacac

SEQ ID NO: 43909 - DNA, 25 bp, Artificial Sequence
  Synthetic: FXN 3 forward 9:69045205-69045233; SpCas9
gctagcctattggaaaacacgggct

SEQ ID NO: 43910 - DNA, 24 bp, Artificial Sequence
  Synthetic: FXN 3 forward 9:69045206-69045233; SpCas9
ctagcctattggaaaacacgggct

SEQ ID NO: 43911 - DNA, 23 bp, Artificial Sequence
  Synthetic: FXN 3 forward 9:69045207-69045233; SpCas9
tagcctattggaaaacacgggct

SEQ ID NO: 43912 - DNA, 22 bp, Artificial Sequence
  Synthetic: FXN 3 forward 9:69045208-69045233; SpCas9
agcctattggaaaacacgggct

SEQ ID NO: 43913 - DNA, 21 bp, Artificial Sequence
  Synthetic: FXN 3 forward 9:69045209-69045233; SpCas9
gcctattggaaaacacgggct

SEQ ID NO: 43914 - DNA, 20 bp, Artificial Sequence
  Synthetic: FXN 3 forward 9:69045210-69045233; SpCas9
cctattggaaaacacgggct

SEQ ID NO: 43915 - DNA, 19 bp, Artificial Sequence
  Synthetic: FXN 3 forward 9:69045211-69045233; SpCas9
ctattggaaaacacgggct

SEQ ID NO: 43916 - DNA, 18 bp, Artificial Sequence
  Synthetic: FXN 3 forward 9:69045212-69045233; SpCas9
tattggaaaacacgggct

SEQ ID NO: 43917 - DNA, 25 bp, Artificial Sequence
  Synthetic: FXN 3 reverse 9:69045206-69045234; SpCas9
tctaagcccgtgttttccaataggc

SEQ ID NO: 43918 - DNA, 24 bp, Artificial Sequence
  Synthetic: FXN 3 reverse 9:69045207-69045234; SpCas9
ctaagcccgtgttttccaataggc

SEQ ID NO: 43919 - DNA, 23 bp, Artificial Sequence
  Synthetic: FXN 3 reverse 9:69045208-69045234; SpCas9
taagcccgtgttttccaataggc

SEQ ID NO: 43920 - DNA, 22 bp, Artificial Sequence
  Synthetic: FXN 3 reverse 9:69045209-69045234; SpCas9
aagcccgtgttttccaataggc

SEQ ID NO: 43921 - DNA, 21 bp, Artificial Sequence
  Synthetic: FXN 3 reverse 9:69045210-69045234; SpCas9
agcccgtgttttccaataggc

SEQ ID NO: 43922 - DNA, 20 bp, Artificial Sequence
  Synthetic: FXN 3 reverse 9:69045211-69045234; SpCas9
gcccgtgttttccaataggc

SEQ ID NO: 43923 - DNA, 19 bp, Artificial Sequence
  Synthetic: FXN 3 reverse 9:69045212-69045234; SpCas9
cccgtgttttccaataggc

SEQ ID NO: 43924 - DNA, 18 bp, Artificial Sequence
  Synthetic: FXN 3 reverse 9:69045213-69045234; SpCas9
ccgtgttttccaataggc

SEQ ID NO: 43925 - DNA, 25 bp, Artificial Sequence
  Synthetic: FXN 3 forward 9:69045207-69045235; SpCas9
tagcctattggaaaacacgggctta

SEQ ID NO: 43926 - DNA, 24 bp, Artificial Sequence
  Synthetic: FXN 3 forward 9:69045208-69045235; SpCas9
agcctattggaaaacacgggctta

SEQ ID NO: 43927 - DNA, 23 bp, Artificial Sequence
  Synthetic: FXN 3 forward 9:69045209-69045235; SpCas9
gcctattggaaaacacgggctta

SEQ ID NO: 43928 - DNA, 22 bp, Artificial Sequence
  Synthetic: FXN 3 forward 9:69045210-69045235; SpCas9
cctattggaaaacacgggctta

SEQ ID NO: 43929 - DNA, 21 bp, Artificial Sequence
  Synthetic: FXN 3 forward 9:69045211-69045235; SpCas9
ctattggaaaacacgggctta

SEQ ID NO: 43930 - DNA, 20 bp, Artificial Sequence
  Synthetic: FXN 3 forward 9:69045212-69045235; SpCas9
tattggaaaacacgggctta

SEQ ID NO: 43931 - DNA, 19 bp, Artificial Sequence
  Synthetic: FXN 3 forward 9:69045213-69045235; SpCas9
attggaaaacacgggctta

SEQ ID NO: 43932 - DNA, 18 bp, Artificial Sequence
  Synthetic: FXN 3 forward 9:69045214-69045235; SpCas9
ttggaaaacacgggctta

SEQ ID NO: 43933 - DNA, 25 bp, Artificial Sequence
  Synthetic: FXN 3 forward 9:69045209-69045237; SpCas9
gcctattggaaaacacgggcttaga

SEQ ID NO: 43934 - DNA, 24 bp, Artificial Sequence
  Synthetic: FXN 3 forward 9:69045210-69045237; SpCas9
cctattggaaaacacgggcttaga

SEQ ID NO: 43935 - DNA, 23 bp, Artificial Sequence
  Synthetic: FXN 3 forward 9:69045211-69045237; SpCas9
ctattggaaaacacgggcttaga

SEQ ID NO: 43936 - DNA, 22 bp, Artificial Sequence
  Synthetic: FXN 3 forward 9:69045212-69045237; SpCas9
tattggaaaacacgggcttaga

SEQ ID NO: 43937 - DNA, 21 bp, Artificial Sequence
  Synthetic: FXN 3 forward 9:69045213-69045237; SpCas9
attggaaaacacgggcttaga

SEQ ID NO: 43938 - DNA, 20 bp, Artificial Sequence
  Synthetic: FXN 3 forward 9:69045214-69045237; SpCas9
ttggaaaacacgggcttaga

SEQ ID NO: 43939 - DNA, 19 bp, Artificial Sequence
  Synthetic: FXN 3 forward 9:69045215-69045237; SpCas9
tggaaaacacgggcttaga

SEQ ID NO: 43940 - DNA, 18 bp, Artificial Sequence
  Synthetic: FXN 3 forward 9:69045216-69045237; SpCas9
ggaaaacacgggcttaga

SEQ ID NO: 43941 - DNA, 25 bp, Artificial Sequence
  Synthetic: FXN 3 reverse 9:69045210-69045238; SpCas9
tctctctaagcccgtgttttccaat

SEQ ID NO: 43942 - DNA, 24 bp, Artificial Sequence
  Synthetic: FXN 3 reverse 9:69045211-69045238; SpCas9
ctctctaagcccgtgttttccaat

SEQ ID NO: 43943 - DNA, 23 bp, Artificial Sequence
  Synthetic: FXN 3 reverse 9:69045212-69045238; SpCas9
tctctaagcccgtgttttccaat

SEQ ID NO: 43944 - DNA, 22 bp, Artificial Sequence
  Synthetic: FXN 3 reverse 9:69045213-69045238; SpCas9
ctctaagcccgtgttttccaat

SEQ ID NO: 43945 - DNA, 21 bp, Artificial Sequence
  Synthetic: FXN 3 reverse 9:69045214-69045238; SpCas9
tctaagcccgtgttttccaat

SEQ ID NO: 43946 - DNA, 20 bp, Artificial Sequence
  Synthetic: FXN 3 reverse 9:69045215-69045238; SpCas9
ctaagcccgtgttttccaat

SEQ ID NO: 43947 - DNA, 19 bp, Artificial Sequence
  Synthetic: FXN 3 reverse 9:69045216-69045238; SpCas9
taagcccgtgttttccaat

SEQ ID NO: 43948 - DNA, 18 bp, Artificial Sequence
  Synthetic: FXN 3 reverse 9:69045217-69045238; SpCas9
aagcccgtgttttccaat

SEQ ID NO: 43949 - DNA, 25 bp, Artificial Sequence
  Synthetic: FXN 3 reverse 9:69045211-69045239; SpCas9
gtctctctaagcccgtgttttccaa

SEQ ID NO: 43950 - DNA, 24 bp, Artificial Sequence
  Synthetic: FXN 3 reverse 9:69045212-69045239; SpCas9
tctctctaagcccgtgttttccaa

SEQ ID NO: 43951 - DNA, 23 bp, Artificial Sequence
  Synthetic: FXN 3 reverse 9:69045213-69045239; SpCas9
ctctctaagcccgtgttttccaa

SEQ ID NO: 43952 - DNA, 22 bp, Artificial Sequence
  Synthetic: FXN 3 reverse 9:69045214-69045239; SpCas9
tctctaagcccgtgttttccaa

SEQ ID NO: 43953 - DNA, 21 bp, Artificial Sequence
  Synthetic: FXN 3 reverse 9:69045215-69045239; SpCas9
ctctaagcccgtgttttccaa

SEQ ID NO: 43954 - DNA, 20 bp, Artificial Sequence
  Synthetic: FXN 3 reverse 9:69045216-69045239; SpCas9
tctaagcccgtgttttccaa

SEQ ID NO: 43955 - DNA, 19 bp, Artificial Sequence
  Synthetic: FXN 3 reverse 9:69045217-69045239; SpCas9
ctaagcccgtgttttccaa

SEQ ID NO: 43956 - DNA, 18 bp, Artificial Sequence
  Synthetic: FXN 3 reverse 9:69045218-69045239; SpCas9
taagcccgtgttttccaa

SEQ ID NO: 43957 - DNA, 25 bp, Artificial Sequence
  Synthetic: FXN 3 forward 9:69045215-69045243; SpCas9
tggaaaacacgggcttagagagaca

SEQ ID NO: 43958 - DNA, 24 bp, Artificial Sequence
  Synthetic: FXN 3 forward 9:69045216-69045243; SpCas9
ggaaaacacgggcttagagagaca

SEQ ID NO: 43959 - DNA, 23 bp, Artificial Sequence
  Synthetic: FXN 3 forward 9:69045217-69045243; SpCas9
gaaaacacgggcttagagagaca

SEQ ID NO: 43960 - DNA, 22 bp, Artificial Sequence
  Synthetic: FXN 3 forward 9:69045218-69045243; SpCas9
aaaacacgggcttagagagaca

SEQ ID NO: 43961 - DNA, 21 bp, Artificial Sequence
  Synthetic: FXN 3 forward 9:69045219-69045243; SpCas9
aaacacgggcttagagagaca

SEQ ID NO: 43962 - DNA, 20 bp, Artificial Sequence
  Synthetic: FXN 3 forward 9:69045220-69045243; SpCas9
aacacgggcttagagagaca

SEQ ID NO: 43963 - DNA, 19 bp, Artificial Sequence
  Synthetic: FXN 3 forward 9:69045221-69045243; SpCas9
acacgggcttagagagaca

SEQ ID NO: 43964 - DNA, 18 bp, Artificial Sequence
  Synthetic: FXN 3 forward 9:69045222-69045243; SpCas9
cacgggcttagagagaca

SEQ ID NO: 43965 - DNA, 25 bp, Artificial Sequence
  Synthetic: FXN 3 forward 9:69045216-69045244; SpCas9
ggaaaacacgggcttagagagacac

SEQ ID NO: 43966 - DNA, 24 bp, Artificial Sequence
  Synthetic: FXN 3 forward 9:69045217-69045244; SpCas9
gaaaacacgggcttagagagacac

SEQ ID NO: 43967 - DNA, 23 bp, Artificial Sequence
  Synthetic: FXN 3 forward 9:69045218-69045244; SpCas9
aaaacacgggcttagagagacac

SEQ ID NO: 43968 - DNA, 22 bp, Artificial Sequence
  Synthetic: FXN 3 forward 9:69045219-69045244; SpCas9
aaacacgggcttagagagacac

SEQ ID NO: 43969 - DNA, 21 bp, Artificial Sequence
  Synthetic: FXN 3 forward 9:69045220-69045244; SpCas9
aacacgggcttagagagacac

SEQ ID NO: 43970 - DNA, 20 bp, Artificial Sequence
  Synthetic: FXN 3 forward 9:69045221-69045244; SpCas9
acacgggcttagagagacac

SEQ ID NO: 43971 - DNA, 19 bp, Artificial Sequence
  Synthetic: FXN 3 forward 9:69045222-69045244; SpCas9
cacgggcttagagagacac

SEQ ID NO: 43972 - DNA, 18 bp, Artificial Sequence
  Synthetic: FXN 3 forward 9:69045223-69045244; SpCas9
acgggcttagagagacac

SEQ ID NO: 43973 - DNA, 25 bp, Artificial Sequence
  Synthetic: FXN 3 forward 9:69045217-69045245; SpCas9
gaaaacacgggcttagagagacaca

SEQ ID NO: 43974 - DNA, 24 bp, Artificial Sequence
  Synthetic: FXN 3 forward 9:69045218-69045245; SpCas9
aaaacacgggcttagagagacaca

SEQ ID NO: 43975 - DNA, 23 bp, Artificial Sequence
  Synthetic: FXN 3 forward 9:69045219-69045245; SpCas9
aaacacgggcttagagagacaca

SEQ ID NO: 43976 - DNA, 22 bp, Artificial Sequence
  Synthetic: FXN 3 forward 9:69045220-69045245; SpCas9
aacacgggcttagagagacaca

SEQ ID NO: 43977 - DNA, 21 bp, Artificial Sequence
  Synthetic: FXN 3 forward 9:69045221-69045245; SpCas9
acacgggcttagagagacaca

SEQ ID NO: 43978 - DNA, 20 bp, Artificial Sequence
  Synthetic: FXN 3 forward 9:69045222-69045245; SpCas9
cacgggcttagagagacaca

SEQ ID NO: 43979 - DNA, 19 bp, Artificial Sequence
  Synthetic: FXN 3 forward 9:69045223-69045245; SpCas9
acgggcttagagagacaca

SEQ ID NO: 43980 - DNA, 18 bp, Artificial Sequence
  Synthetic: FXN 3 forward 9:69045224-69045245; SpCas9
cgggcttagagagacaca

SEQ ID NO: 43981 - DNA, 25 bp, Artificial Sequence
  Synthetic: FXN 3 forward 9:69045219-69045247; SpCas9
aaacacgggcttagagagacacagg

SEQ ID NO: 43982 - DNA, 24 bp, Artificial Sequence
  Synthetic: FXN 3 forward 9:69045220-69045247; SpCas9
aacacgggcttagagagacacagg

SEQ ID NO: 43983 - DNA, 23 bp, Artificial Sequence
  Synthetic: FXN 3 forward 9:69045221-69045247; SpCas9
acacgggcttagagagacacagg

SEQ ID NO: 43984 - DNA, 22 bp, Artificial Sequence
  Synthetic: FXN 3 forward 9:69045222-69045247; SpCas9
cacgggcttagagagacacagg

SEQ ID NO: 43985 - DNA, 21 bp, Artificial Sequence
  Synthetic: FXN 3 forward 9:69045223-69045247; SpCas9
acgggcttagagagacacagg

SEQ ID NO: 43986 - DNA, 20 bp, Artificial Sequence
  Synthetic: FXN 3 forward 9:69045224-69045247; SpCas9
cgggcttagagagacacagg

SEQ ID NO: 43987 - DNA, 19 bp, Artificial Sequence
  Synthetic: FXN 3 forward 9:69045225-69045247; SpCas9
gggcttagagagacacagg

SEQ ID NO: 43988 - DNA, 18 bp, Artificial Sequence
  Synthetic: FXN 3 forward 9:69045226-69045247; SpCas9
ggcttagagagacacagg

SEQ ID NO: 43989 - DNA, 25 bp, Artificial Sequence
  Synthetic: FXN 3 reverse 9:69045228-69045256; SpCas9
acagtgattctccctgtgtctctct

SEQ ID NO: 43990 - DNA, 24 bp, Artificial Sequence
  Synthetic: FXN 3 reverse 9:69045229-69045256; SpCas9
cagtgattctccctgtgtctctct

SEQ ID NO: 43991 - DNA, 23 bp, Artificial Sequence
  Synthetic: FXN 3 reverse 9:69045230-69045256; SpCas9
agtgattctccctgtgtctctct

SEQ ID NO: 43992 - DNA, 22 bp, Artificial Sequence
  Synthetic: FXN 3 reverse 9:69045231-69045256; SpCas9
gtgattctccctgtgtctctct

SEQ ID NO: 43993 - DNA, 21 bp, Artificial Sequence
  Synthetic: FXN 3 reverse 9:69045232-69045256; SpCas9
tgattctccctgtgtctctct

SEQ ID NO: 43994 - DNA, 20 bp, Artificial Sequence
  Synthetic: FXN 3 reverse 9:69045233-69045256; SpCas9
gattctccctgtgtctctct

SEQ ID NO: 43995 - DNA, 19 bp, Artificial Sequence
  Synthetic: FXN 3 reverse 9:69045234-69045256; SpCas9
attctccctgtgtctctct

SEQ ID NO: 43996 - DNA, 18 bp, Artificial Sequence
  Synthetic: FXN 3 reverse 9:69045235-69045256; SpCas9
ttctccctgtgtctctct

SEQ ID NO: 43997 - DNA, 25 bp, Artificial Sequence
  Synthetic: FXN 3 forward 9:69045241-69045269; SpCas9
agggagaatcactgtaatgcactaa

SEQ ID NO: 43998 - DNA, 24 bp, Artificial Sequence
  Synthetic: FXN 3 forward 9:69045242-69045269; SpCas9
gggagaatcactgtaatgcactaa

SEQ ID NO: 43999 - DNA, 23 bp, Artificial Sequence
  Synthetic: FXN 3 forward 9:69045243-69045269; SpCas9
ggagaatcactgtaatgcactaa

SEQ ID NO: 44000 - DNA, 22 bp, Artificial Sequence
  Synthetic: FXN 3 forward 9:69045244-69045269; SpCas9
gagaatcactgtaatgcactaa

SEQ ID NO: 44001 - DNA, 21 bp, Artificial Sequence
  Synthetic: FXN 3 forward 9:69045245-69045269; SpCas9
agaatcactgtaatgcactaa

SEQ ID NO: 44002 - DNA, 20 bp, Artificial Sequence
  Synthetic: FXN 3 forward 9:69045246-69045269; SpCas9
gaatcactgtaatgcactaa

SEQ ID NO: 44003 - DNA, 19 bp, Artificial Sequence
  Synthetic: FXN 3 forward 9:69045247-69045269; SpCas9
aatcactgtaatgcactaa

SEQ ID NO: 44004 - DNA, 18 bp, Artificial Sequence
  Synthetic: FXN 3 forward 9:69045248-69045269; SpCas9
atcactgtaatgcactaa

SEQ ID NO: 44005 - DNA, 25 bp, Artificial Sequence
  Synthetic: FXN 3 forward 9:69045244-69045272; SpCas9
gagaatcactgtaatgcactaaaag

SEQ ID NO: 44006 - DNA, 24 bp, Artificial Sequence
  Synthetic: FXN 3 forward 9:69045245-69045272; SpCas9
agaatcactgtaatgcactaaaag

SEQ ID NO: 44007 - DNA, 23 bp, Artificial Sequence
  Synthetic: FXN 3 forward 9:69045246-69045272; SpCas9
gaatcactgtaatgcactaaaag

SEQ ID NO: 44008 - DNA, 22 bp, Artificial Sequence
  Synthetic: FXN 3 forward 9:69045247-69045272; SpCas9
aatcactgtaatgcactaaaag

SEQ ID NO: 44009 - DNA, 21 bp, Artificial Sequence
  Synthetic: FXN 3 forward 9:69045248-69045272; SpCas9
atcactgtaatgcactaaaag

SEQ ID NO: 44010 - DNA, 20 bp, Artificial Sequence
  Synthetic: FXN 3 forward 9:69045249-69045272; SpCas9
tcactgtaatgcactaaaag

SEQ ID NO: 44011 - DNA, 19 bp, Artificial Sequence
  Synthetic: FXN 3 forward 9:69045250-69045272; SpCas9
cactgtaatgcactaaaag

SEQ ID NO: 44012 - DNA, 18 bp, Artificial Sequence
  Synthetic: FXN 3 forward 9:69045251-69045272; SpCas9
actgtaatgcactaaaag

SEQ ID NO: 44013 - DNA, 25 bp, Artificial Sequence
  Synthetic: FXN 3 forward 9:69045245-69045273; SpCas9
agaatcactgtaatgcactaaaaga

SEQ ID NO: 44014 - DNA, 24 bp, Artificial Sequence
  Synthetic: FXN 3 forward 9:69045246-69045273; SpCas9
gaatcactgtaatgcactaaaaga

SEQ ID NO: 44015 - DNA, 23 bp, Artificial Sequence
  Synthetic: FXN 3 forward 9:69045247-69045273; SpCas9
aatcactgtaatgcactaaaaga

SEQ ID NO: 44016 - DNA, 22 bp, Artificial Sequence
  Synthetic: FXN 3 forward 9:69045248-69045273; SpCas9
atcactgtaatgcactaaaaga

SEQ ID NO: 44017 - DNA, 21 bp, Artificial Sequence
  Synthetic: FXN 3 forward 9:69045249-69045273; SpCas9
tcactgtaatgcactaaaaga

SEQ ID NO: 44018 - DNA, 20 bp, Artificial Sequence
  Synthetic: FXN 3 forward 9:69045250-69045273; SpCas9
cactgtaatgcactaaaaga

SEQ ID NO: 44019 - DNA, 19 bp, Artificial Sequence
  Synthetic: FXN 3 forward 9:69045251-69045273; SpCas9
actgtaatgcactaaaaga

SEQ ID NO: 44020 - DNA, 18 bp, Artificial Sequence
  Synthetic: FXN 3 forward 9:69045252-69045273; SpCas9
ctgtaatgcactaaaaga

SEQ ID NO: 44021 - DNA, 25 bp, Artificial Sequence
  Synthetic: FXN 3 reverse 9:69045252-69045280; SpCas9
ttttttaccttcttttagtgcatta

SEQ ID NO: 44022 - DNA, 24 bp, Artificial Sequence
  Synthetic: FXN 3 reverse 9:69045253-69045280; SpCas9
tttttaccttcttttagtgcatta

SEQ ID NO: 44023 - DNA, 23 bp, Artificial Sequence
  Synthetic: FXN 3 reverse 9:69045254-69045280; SpCas9
ttttaccttcttttagtgcatta

SEQ ID NO: 44024 - DNA, 22 bp, Artificial Sequence
  Synthetic: FXN 3 reverse 9:69045255-69045280; SpCas9
tttaccttcttttagtgcatta

SEQ ID NO: 44025 - DNA, 21 bp, Artificial Sequence
  Synthetic: FXN 3 reverse 9:69045256-69045280; SpCas9
ttaccttcttttagtgcatta

SEQ ID NO: 44026 - DNA, 20 bp, Artificial Sequence
  Synthetic: FXN 3 reverse 9:69045257-69045280; SpCas9
taccttcttttagtgcatta

SEQ ID NO: 44027 - DNA, 19 bp, Artificial Sequence
  Synthetic: FXN 3 reverse 9:69045258-69045280; SpCas9
accttcttttagtgcatta

SEQ ID NO: 44028 - DNA, 18 bp, Artificial Sequence
  Synthetic: FXN 3 reverse 9:69045259-69045280; SpCas9
ccttcttttagtgcatta

SEQ ID NO: 44029 - DNA, 25 bp, Artificial Sequence
  Synthetic: FXN 3 reverse 9:69045262-69045290; SpCas9
ggatttttttttttttaccttcttt

SEQ ID NO: 44030 - DNA, 24 bp, Artificial Sequence
  Synthetic: FXN 3 reverse 9:69045263-69045290; SpCas9
gatttttttttttttaccttcttt

SEQ ID NO: 44031 - DNA, 23 bp, Artificial Sequence
  Synthetic: FXN 3 reverse 9:69045264-69045290; SpCas9
atttttttttttttaccttcttt

SEQ ID NO: 44032 - DNA, 22 bp, Artificial Sequence
  Synthetic: FXN 3 reverse 9:69045265-69045290; SpCas9
tttttttttttttaccttcttt

SEQ ID NO: 44033 - DNA, 21 bp, Artificial Sequence
  Synthetic: FXN 3 reverse 9:69045266-69045290; SpCas9
ttttttttttttaccttcttt

SEQ ID NO: 44034 - DNA, 20 bp, Artificial Sequence
  Synthetic: FXN 3 reverse 9:69045267-69045290; SpCas9
tttttttttttaccttcttt

SEQ ID NO: 44035 - DNA, 19 bp, Artificial Sequence
  Synthetic: FXN 3 reverse 9:69045268-69045290; SpCas9
ttttttttttaccttcttt

SEQ ID NO: 44036 - DNA, 18 bp, Artificial Sequence
  Synthetic: FXN 3 reverse 9:69045269-69045290; SpCas9
tttttttttaccttcttt

SEQ ID NO: 44037 - DNA, 25 bp, Artificial Sequence
  Synthetic: FXN 3 forward 9:69045266-69045294; SpCas9
aagaaggtaaaaaaaaaaaaatcct

SEQ ID NO: 44038 - DNA, 24 bp, Artificial Sequence
  Synthetic: FXN 3 forward 9:69045267-69045294; SpCas9
agaaggtaaaaaaaaaaaaatcct

SEQ ID NO: 44039 - DNA, 23 bp, Artificial Sequence
  Synthetic: FXN 3 forward 9:69045268-69045294; SpCas9
gaaggtaaaaaaaaaaaaatcct

SEQ ID NO: 44040 - DNA, 22 bp, Artificial Sequence
  Synthetic: FXN 3 forward 9:69045269-69045294; SpCas9
aaggtaaaaaaaaaaaaatcct

SEQ ID NO: 44041 - DNA, 21 bp, Artificial Sequence
  Synthetic: FXN 3 forward 9:69045270-69045294; SpCas9
aggtaaaaaaaaaaaaatcct

SEQ ID NO: 44042 - DNA, 20 bp, Artificial Sequence
  Synthetic: FXN 3 forward 9:69045271-69045294; SpCas9
ggtaaaaaaaaaaaaatcct

SEQ ID NO: 44043 - DNA, 19 bp, Artificial Sequence
  Synthetic: FXN 3 forward 9:69045272-69045294; SpCas9
gtaaaaaaaaaaaaatcct

SEQ ID NO: 44044 - DNA, 18 bp, Artificial Sequence
  Synthetic: FXN 3 forward 9:69045273-69045294; SpCas9
taaaaaaaaaaaaatcct

SEQ ID NO: 44045 - DNA, 25 bp, Artificial Sequence
  Synthetic: FXN 3 reverse 9:69045288-69045316; SpCas9
ttaaagtattttaggaatatttctt

SEQ ID NO: 44046 - DNA, 24 bp, Artificial Sequence
  Synthetic: FXN 3 reverse 9:69045289-69045316; SpCas9
taaagtattttaggaatatttctt

SEQ ID NO: 44047 - DNA, 23 bp, Artificial Sequence
  Synthetic: FXN 3 reverse 9:69045290-69045316; SpCas9
aaagtattttaggaatatttctt

SEQ ID NO: 44048 - DNA, 22 bp, Artificial Sequence
  Synthetic: FXN 3 reverse 9:69045291-69045316; SpCas9
aagtattttaggaatatttctt

SEQ ID NO: 44049 - DNA, 21 bp, Artificial Sequence
  Synthetic: FXN 3 reverse 9:69045292-69045316; SpCas9
agtattttaggaatatttctt

SEQ ID NO: 44050 - DNA, 20 bp, Artificial Sequence
  Synthetic: FXN 3 reverse 9:69045293-69045316; SpCas9
gtattttaggaatatttctt

SEQ ID NO: 44051 - DNA, 19 bp, Artificial Sequence
  Synthetic: FXN 3 reverse 9:69045294-69045316; SpCas9
tattttaggaatatttctt

SEQ ID NO: 44052 - DNA, 18 bp, Artificial Sequence
  Synthetic: FXN 3 reverse 9:69045295-69045316; SpCas9
attttaggaatatttctt

SEQ ID NO: 44053 - DNA, 25 bp, Artificial Sequence
  Synthetic: FXN 3 reverse 9:69045289-69045317; SpCas9
attaaagtattttaggaatatttct

SEQ ID NO: 44054 - DNA, 24 bp, Artificial Sequence
  Synthetic: FXN 3 reverse 9:69045290-69045317; SpCas9
ttaaagtattttaggaatatttct

SEQ ID NO: 44055 - DNA, 23 bp, Artificial Sequence
  Synthetic: FXN 3 reverse 9:69045291-69045317; SpCas9
taaagtattttaggaatatttct

SEQ ID NO: 44056 - DNA, 22 bp, Artificial Sequence
  Synthetic: FXN 3 reverse 9:69045292-69045317; SpCas9
aaagtattttaggaatatttct

SEQ ID NO: 44057 - DNA, 21 bp, Artificial Sequence
  Synthetic: FXN 3 reverse 9:69045293-69045317; SpCas9
aagtattttaggaatatttct

SEQ ID NO: 44058 - DNA, 20 bp, Artificial Sequence
  Synthetic: FXN 3 reverse 9:69045294-69045317; SpCas9
agtattttaggaatatttct

SEQ ID NO: 44059 - DNA, 19 bp, Artificial Sequence
  Synthetic: FXN 3 reverse 9:69045295-69045317; SpCas9
gtattttaggaatatttct

SEQ ID NO: 44060 - DNA, 18 bp, Artificial Sequence
  Synthetic: FXN 3 reverse 9:69045296-69045317; SpCas9
tattttaggaatatttct

SEQ ID NO: 44061 - DNA, 25 bp, Artificial Sequence
  Synthetic: FXN 3 forward 9:69045293-69045321; SpCas9
gaaatattcctaaaatactttaata

SEQ ID NO: 44062 - DNA, 24 bp, Artificial Sequence
  Synthetic: FXN 3 forward 9:69045294-69045321; SpCas9
aaatattcctaaaatactttaata

SEQ ID NO: 44063 - DNA, 23 bp, Artificial Sequence
  Synthetic: FXN 3 forward 9:69045295-69045321; SpCas9
aatattcctaaaatactttaata

SEQ ID NO: 44064 - DNA, 22 bp, Artificial Sequence
  Synthetic: FXN 3 forward 9:69045296-69045321; SpCas9
atattcctaaaatactttaata

SEQ ID NO: 44065 - DNA, 21 bp, Artificial Sequence
  Synthetic: FXN 3 forward 9:69045297-69045321; SpCas9
tattcctaaaatactttaata

SEQ ID NO: 44066 - DNA, 20 bp, Artificial Sequence
  Synthetic: FXN 3 forward 9:69045298-69045321; SpCas9
attcctaaaatactttaata

SEQ ID NO: 44067 - DNA, 19 bp, Artificial Sequence
  Synthetic: FXN 3 forward 9:69045299-69045321; SpCas9
ttcctaaaatactttaata

SEQ ID NO: 44068 - DNA, 18 bp, Artificial Sequence
  Synthetic: FXN 3 forward 9:69045300-69045321; SpCas9
tcctaaaatactttaata

SEQ ID NO: 44069 - DNA, 25 bp, Artificial Sequence
  Synthetic: FXN 3 forward 9:69045294-69045322; SpCas9
aaatattcctaaaatactttaatat

SEQ ID NO: 44070 - DNA, 24 bp, Artificial Sequence
  Synthetic: FXN 3 forward 9:69045295-69045322; SpCas9
aatattcctaaaatactttaatat

SEQ ID NO: 44071 - DNA, 23 bp, Artificial Sequence
  Synthetic: FXN 3 forward 9:69045296-69045322; SpCas9
atattcctaaaatactttaatat

SEQ ID NO: 44072 - DNA, 22 bp, Artificial Sequence
  Synthetic: FXN 3 forward 9:69045297-69045322; SpCas9
tattcctaaaatactttaatat

SEQ ID NO: 44073 - DNA, 21 bp, Artificial Sequence
  Synthetic: FXN 3 forward 9:69045298-69045322; SpCas9
attcctaaaatactttaatat

SEQ ID NO: 44074 - DNA, 20 bp, Artificial Sequence
  Synthetic: FXN 3 forward 9:69045299-69045322; SpCas9
ttcctaaaatactttaatat

SEQ ID NO: 44075 - DNA, 19 bp, Artificial Sequence
  Synthetic: FXN 3 forward 9:69045300-69045322; SpCas9
tcctaaaatactttaatat

SEQ ID NO: 44076 - DNA, 18 bp, Artificial Sequence
  Synthetic: FXN 3 forward 9:69045301-69045322; SpCas9
cctaaaatactttaatat

SEQ ID NO: 44077 - DNA, 25 bp, Artificial Sequence
  Synthetic: FXN 3 forward 9:69045295-69045323; SpCas9
aatattcctaaaatactttaatata

SEQ ID NO: 44078 - DNA, 24 bp, Artificial Sequence
  Synthetic: FXN 3 forward 9:69045296-69045323; SpCas9
atattcctaaaatactttaatata

SEQ ID NO: 44079 - DNA, 23 bp, Artificial Sequence
  Synthetic: FXN 3 forward 9:69045297-69045323; SpCas9
tattcctaaaatactttaatata

SEQ ID NO: 44080 - DNA, 22 bp, Artificial Sequence
  Synthetic: FXN 3 forward 9:69045298-69045323; SpCas9
attcctaaaatactttaatata

SEQ ID NO: 44081 - DNA, 21 bp, Artificial Sequence
  Synthetic: FXN 3 forward 9:69045299-69045323; SpCas9
ttcctaaaatactttaatata

SEQ ID NO: 44082 - DNA, 20 bp, Artificial Sequence
  Synthetic: FXN 3 forward 9:69045300-69045323; SpCas9
tcctaaaatactttaatata

SEQ ID NO: 44083 - DNA, 19 bp, Artificial Sequence
  Synthetic: FXN 3 forward 9:69045301-69045323; SpCas9
cctaaaatactttaatata

SEQ ID NO: 44084 - DNA, 18 bp, Artificial Sequence
  Synthetic: FXN 3 forward 9:69045302-69045323; SpCas9
ctaaaatactttaatata

SEQ ID NO: 44085 - DNA, 25 bp, Artificial Sequence
  Synthetic: FXN 3 forward 9:69045299-69045327; SpCas9
ttcctaaaatactttaatatagggc

SEQ ID NO: 44086 - DNA, 24 bp, Artificial Sequence
  Synthetic: FXN 3 forward 9:69045300-69045327; SpCas9
tcctaaaatactttaatatagggc

SEQ ID NO: 44087 - DNA, 23 bp, Artificial Sequence
  Synthetic: FXN 3 forward 9:69045301-69045327; SpCas9
cctaaaatactttaatatagggc

SEQ ID NO: 44088 - DNA, 22 bp, Artificial Sequence
  Synthetic: FXN 3 forward 9:69045302-69045327; SpCas9
ctaaaatactttaatatagggc

SEQ ID NO: 44089 - DNA, 21 bp, Artificial Sequence
  Synthetic: FXN 3 forward 9:69045303-69045327; SpCas9
taaaatactttaatatagggc

SEQ ID NO: 44090 - DNA, 20 bp, Artificial Sequence
  Synthetic: FXN 3 forward 9:69045304-69045327; SpCas9
aaaatactttaatatagggc

SEQ ID NO: 44091 - DNA, 19 bp, Artificial Sequence
  Synthetic: FXN 3 forward 9:69045305-69045327; SpCas9
aaatactttaatatagggc

SEQ ID NO: 44092 - DNA, 18 bp, Artificial Sequence
  Synthetic: FXN 3 forward 9:69045306-69045327; SpCas9
aatactttaatatagggc

SEQ ID NO: 44093 - DNA, 25 bp, Artificial Sequence
  Synthetic: FXN 3 forward 9:69045300-69045328; SpCas9
tcctaaaatactttaatatagggct

SEQ ID NO: 44094 - DNA, 24 bp, Artificial Sequence
  Synthetic: FXN 3 forward 9:69045301-69045328; SpCas9
cctaaaatactttaatatagggct

SEQ ID NO: 44095 - DNA, 23 bp, Artificial Sequence
  Synthetic: FXN 3 forward 9:69045302-69045328; SpCas9
ctaaaatactttaatatagggct

SEQ ID NO: 44096 - DNA, 22 bp, Artificial Sequence
  Synthetic: FXN 3 forward 9:69045303-69045328; SpCas9
taaaatactttaatatagggct

SEQ ID NO: 44097 - DNA, 21 bp, Artificial Sequence
  Synthetic: FXN 3 forward 9:69045304-69045328; SpCas9
aaaatactttaatatagggct

SEQ ID NO: 44098 - DNA, 20 bp, Artificial Sequence
  Synthetic: FXN 3 forward 9:69045305-69045328; SpCas9
aaatactttaatatagggct

SEQ ID NO: 44099 - DNA, 19 bp, Artificial Sequence
  Synthetic: FXN 3 forward 9:69045306-69045328; SpCas9
aatactttaatatagggct

SEQ ID NO: 44100 - DNA, 18 bp, Artificial Sequence
  Synthetic: FXN 3 forward 9:69045307-69045328; SpCas9
atactttaatatagggct

SEQ ID NO: 44101 - DNA, 25 bp, Artificial Sequence
  Synthetic: FXN 3 reverse 9:69045301-69045329; SpCas9
acccagccctatattaaagtatttt

SEQ ID NO: 44102 - DNA, 24 bp, Artificial Sequence
  Synthetic: FXN 3 reverse 9:69045302-69045329; SpCas9
cccagccctatattaaagtatttt

SEQ ID NO: 44103 - DNA, 23 bp, Artificial Sequence
  Synthetic: FXN 3 reverse 9:69045303-69045329; SpCas9
ccagccctatattaaagtatttt

SEQ ID NO: 44104 - DNA, 22 bp, Artificial Sequence
  Synthetic: FXN 3 reverse 9:69045304-69045329; SpCas9
cagccctatattaaagtatttt

SEQ ID NO: 44105 - DNA, 21 bp, Artificial Sequence
  Synthetic: FXN 3 reverse 9:69045305-69045329; SpCas9
agccctatattaaagtatttt

SEQ ID NO: 44106 - DNA, 20 bp, Artificial Sequence
  Synthetic: FXN 3 reverse 9:69045306-69045329; SpCas9
gccctatattaaagtatttt

SEQ ID NO: 44107 - DNA, 19 bp, Artificial Sequence
  Synthetic: FXN 3 reverse 9:69045307-69045329; SpCas9
ccctatattaaagtatttt

SEQ ID NO: 44108 - DNA, 18 bp, Artificial Sequence
  Synthetic: FXN 3 reverse 9:69045308-69045329; SpCas9
cctatattaaagtatttt

SEQ ID NO: 44109 - DNA, 25 bp, Artificial Sequence
  Synthetic: FXN 3 reverse 9:69045302-69045330; SpCas9
cacccagccctatattaaagtattt

SEQ ID NO: 44110 - DNA, 24 bp, Artificial Sequence
  Synthetic: FXN 3 reverse 9:69045303-69045330; SpCas9
acccagccctatattaaagtattt

SEQ ID NO: 44111 - DNA, 23 bp, Artificial Sequence
  Synthetic: FXN 3 reverse 9:69045304-69045330; SpCas9
cccagccctatattaaagtattt

SEQ ID NO: 44112 - DNA, 22 bp, Artificial Sequence
  Synthetic: FXN 3 reverse 9:69045305-69045330; SpCas9
ccagccctatattaaagtattt

SEQ ID NO: 44113 - DNA, 21 bp, Artificial Sequence
  Synthetic: FXN 3 reverse 9:69045306-69045330; SpCas9
cagccctatattaaagtattt

SEQ ID NO: 44114 - DNA, 20 bp, Artificial Sequence
  Synthetic: FXN 3 reverse 9:69045307-69045330; SpCas9
agccctatattaaagtattt

SEQ ID NO: 44115 - DNA, 19 bp, Artificial Sequence
  Synthetic: FXN 3 reverse 9:69045308-69045330; SpCas9
gccctatattaaagtattt

SEQ ID NO: 44116 - DNA, 18 bp, Artificial Sequence
  Synthetic: FXN 3 reverse 9:69045309-69045330; SpCas9
ccctatattaaagtattt

SEQ ID NO: 44117 - DNA, 25 bp, Artificial Sequence
  Synthetic: FXN 3 forward 9:69045305-69045333; SpCas9
aaatactttaatatagggctgggtg

SEQ ID NO: 44118 - DNA, 24 bp, Artificial Sequence
  Synthetic: FXN 3 forward 9:69045306-69045333; SpCas9
aatactttaatatagggctgggtg

SEQ ID NO: 44119 - DNA, 23 bp, Artificial Sequence
  Synthetic: FXN 3 forward 9:69045307-69045333; SpCas9
atactttaatatagggctgggtg

SEQ ID NO: 44120 - DNA, 22 bp, Artificial Sequence
  Synthetic: FXN 3 forward 9:69045308-69045333; SpCas9
tactttaatatagggctgggtg

SEQ ID NO: 44121 - DNA, 21 bp, Artificial Sequence
  Synthetic: FXN 3 forward 9:69045309-69045333; SpCas9
actttaatatagggctgggtg

SEQ ID NO: 44122 - DNA, 20 bp, Artificial Sequence
  Synthetic: FXN 3 forward 9:69045310-69045333; SpCas9
ctttaatatagggctgggtg

SEQ ID NO: 44123 - DNA, 19 bp, Artificial Sequence
  Synthetic: FXN 3 forward 9:69045311-69045333; SpCas9
tttaatatagggctgggtg

SEQ ID NO: 44124 - DNA, 18 bp, Artificial Sequence
  Synthetic: FXN 3 forward 9:69045312-69045333; SpCas9
ttaatatagggctgggtg

SEQ ID NO: 44125 - DNA, 25 bp, Artificial Sequence
  Synthetic: FXN 3 forward 9:69045308-69045336; SpCas9
tactttaatatagggctgggtgcgg

SEQ ID NO: 44126 - DNA, 24 bp, Artificial Sequence
  Synthetic: FXN 3 forward 9:69045309-69045336; SpCas9
actttaatatagggctgggtgcgg

SEQ ID NO: 44127 - DNA, 23 bp, Artificial Sequence
  Synthetic: FXN 3 forward 9:69045310-69045336; SpCas9
ctttaatatagggctgggtgcgg

SEQ ID NO: 44128 - DNA, 22 bp, Artificial Sequence
  Synthetic: FXN 3 forward 9:69045311-69045336; SpCas9
tttaatatagggctgggtgcgg

SEQ ID NO: 44129 - DNA, 21 bp, Artificial Sequence
  Synthetic: FXN 3 forward 9:69045312-69045336; SpCas9
ttaatatagggctgggtgcgg

SEQ ID NO: 44130 - DNA, 20 bp, Artificial Sequence
  Synthetic: FXN 3 forward 9:69045313-69045336; SpCas9
taatatagggctgggtgcgg

SEQ ID NO: 44131 - DNA, 19 bp, Artificial Sequence
  Synthetic: FXN 3 forward 9:69045314-69045336; SpCas9
aatatagggctgggtgcgg

SEQ ID NO: 44132 - DNA, 18 bp, Artificial Sequence
  Synthetic: FXN 3 forward 9:69045315-69045336; SpCas9
atatagggctgggtgcgg

SEQ ID NO: 44133 - DNA, 25 bp, Artificial Sequence
  Synthetic: FXN 3 reverse 9:69045310-69045338; SpCas9
agccaccgcacccagccctatatta

SEQ ID NO: 44134 - DNA, 24 bp, Artificial Sequence
  Synthetic: FXN 3 reverse 9:69045311-69045338; SpCas9
gccaccgcacccagccctatatta

SEQ ID NO: 44135 - DNA, 23 bp, Artificial Sequence
  Synthetic: FXN 3 reverse 9:69045312-69045338; SpCas9
ccaccgcacccagccctatatta

SEQ ID NO: 44136 - DNA, 22 bp, Artificial Sequence
  Synthetic: FXN 3 reverse 9:69045313-69045338; SpCas9
caccgcacccagccctatatta

SEQ ID NO: 44137 - DNA, 21 bp, Artificial Sequence
  Synthetic: FXN 3 reverse 9:69045314-69045338; SpCas9
accgcacccagccctatatta

SEQ ID NO: 44138 - DNA, 20 bp, Artificial Sequence
  Synthetic: FXN 3 reverse 9:69045315-69045338; SpCas9
ccgcacccagccctatatta

SEQ ID NO: 44139 - DNA, 19 bp, Artificial Sequence
  Synthetic: FXN 3 reverse 9:69045316-69045338; SpCas9
cgcacccagccctatatta

SEQ ID NO: 44140 - DNA, 18 bp, Artificial Sequence
  Synthetic: FXN 3 reverse 9:69045317-69045338; SpCas9
gcacccagccctatatta

SEQ ID NO: 44141 - DNA, 25 bp, Artificial Sequence
  Synthetic: FXN 3 forward 9:69045319-69045347; SpCas9
agggctgggtgcggtggctcacatc

SEQ ID NO: 44142 - DNA, 24 bp, Artificial Sequence
  Synthetic: FXN 3 forward 9:69045320-69045347; SpCas9
gggctgggtgcggtggctcacatc

SEQ ID NO: 44143 - DNA, 23 bp, Artificial Sequence
  Synthetic: FXN 3 forward 9:69045321-69045347; SpCas9
ggctgggtgcggtggctcacatc

SEQ ID NO: 44144 - DNA, 22 bp, Artificial Sequence
  Synthetic: FXN 3 forward 9:69045322-69045347; SpCas9
gctgggtgcggtggctcacatc

SEQ ID NO: 44145 - DNA, 21 bp, Artificial Sequence
  Synthetic: FXN 3 forward 9:69045323-69045347; SpCas9
ctgggtgcggtggctcacatc

SEQ ID NO: 44146 - DNA, 20 bp, Artificial Sequence
  Synthetic: FXN 3 forward 9:69045324-69045347; SpCas9
tgggtgcggtggctcacatc

SEQ ID NO: 44147 - DNA, 19 bp, Artificial Sequence
  Synthetic: FXN 3 forward 9:69045325-69045347; SpCas9
gggtgcggtggctcacatc

SEQ ID NO: 44148 - DNA, 18 bp, Artificial Sequence
  Synthetic: FXN 3 forward 9:69045326-69045347; SpCas9
ggtgcggtggctcacatc

SEQ ID NO: 44149 - DNA, 25 bp, Artificial Sequence
  Synthetic: FXN 3 reverse 9:69045323-69045351; SpCas9
aatgctggatgtgagccaccgcacc

SEQ ID NO: 44150 - DNA, 24 bp, Artificial Sequence
  Synthetic: FXN 3 reverse 9:69045324-69045351; SpCas9
atgctggatgtgagccaccgcacc

SEQ ID NO: 44151 - DNA, 23 bp, Artificial Sequence
  Synthetic: FXN 3 reverse 9:69045325-69045351; SpCas9
tgctggatgtgagccaccgcacc

SEQ ID NO: 44152 - DNA, 22 bp, Artificial Sequence
  Synthetic: FXN 3 reverse 9:69045326-69045351; SpCas9
gctggatgtgagccaccgcacc

SEQ ID NO: 44153 - DNA, 21 bp, Artificial Sequence
  Synthetic: FXN 3 reverse 9:69045327-69045351; SpCas9
ctggatgtgagccaccgcacc

SEQ ID NO: 44154 - DNA, 20 bp, Artificial Sequence
  Synthetic: FXN 3 reverse 9:69045328-69045351; SpCas9
tggatgtgagccaccgcacc

SEQ ID NO: 44155 - DNA, 19 bp, Artificial Sequence
  Synthetic: FXN 3 reverse 9:69045329-69045351; SpCas9
ggatgtgagccaccgcacc

SEQ ID NO: 44156 - DNA, 18 bp, Artificial Sequence
  Synthetic: FXN 3 reverse 9:69045330-69045351; SpCas9
gatgtgagccaccgcacc

SEQ ID NO: 44157 - DNA, 25 bp, Artificial Sequence
  Synthetic: FXN 3 forward 9:69045327-69045355; SpCas9
gtgcggtggctcacatccagcattt

SEQ ID NO: 44158 - DNA, 24 bp, Artificial Sequence
  Synthetic: FXN 3 forward 9:69045328-69045355; SpCas9
tgcggtggctcacatccagcattt

SEQ ID NO: 44159 - DNA, 23 bp, Artificial Sequence
  Synthetic: FXN 3 forward 9:69045329-69045355; SpCas9
gcggtggctcacatccagcattt

SEQ ID NO: 44160 - DNA, 22 bp, Artificial Sequence
  Synthetic: FXN 3 forward 9:69045330-69045355; SpCas9
cggtggctcacatccagcattt

SEQ ID NO: 44161 - DNA, 21 bp, Artificial Sequence
  Synthetic: FXN 3 forward 9:69045331-69045355; SpCas9
ggtggctcacatccagcattt

SEQ ID NO: 44162 - DNA, 20 bp, Artificial Sequence
  Synthetic: FXN 3 forward 9:69045332-69045355; SpCas9
gtggctcacatccagcattt

SEQ ID NO: 44163 - DNA, 19 bp, Artificial Sequence
  Synthetic: FXN 3 forward 9:69045333-69045355; SpCas9
tggctcacatccagcattt

SEQ ID NO: 44164 - DNA, 18 bp, Artificial Sequence
  Synthetic: FXN 3 forward 9:69045334-69045355; SpCas9
ggctcacatccagcattt

SEQ ID NO: 44165 - DNA, 25 bp, Artificial Sequence
  Synthetic: FXN 3 forward 9:69045328-69045356; SpCas9
tgcggtggctcacatccagcatttt

SEQ ID NO: 44166 - DNA, 24 bp, Artificial Sequence
  Synthetic: FXN 3 forward 9:69045329-69045356; SpCas9
gcggtggctcacatccagcatttt

SEQ ID NO: 44167 - DNA, 23 bp, Artificial Sequence
  Synthetic: FXN 3 forward 9:69045330-69045356; SpCas9
cggtggctcacatccagcatttt

SEQ ID NO: 44168 - DNA, 22 bp, Artificial Sequence
  Synthetic: FXN 3 forward 9:69045331-69045356; SpCas9
ggtggctcacatccagcatttt

SEQ ID NO: 44169 - DNA, 21 bp, Artificial Sequence
  Synthetic: FXN 3 forward 9:69045332-69045356; SpCas9
gtggctcacatccagcatttt

SEQ ID NO: 44170 - DNA, 20 bp, Artificial Sequence
  Synthetic: FXN 3 forward 9:69045333-69045356; SpCas9
tggctcacatccagcatttt

SEQ ID NO: 44171 - DNA, 19 bp, Artificial Sequence
  Synthetic: FXN 3 forward 9:69045334-69045356; SpCas9
ggctcacatccagcatttt

SEQ ID NO: 44172 - DNA, 18 bp, Artificial Sequence
  Synthetic: FXN 3 forward 9:69045335-69045356; SpCas9
gctcacatccagcatttt

SEQ ID NO: 44173 - DNA, 25 bp, Artificial Sequence
  Synthetic: FXN 3 forward 9:69045331-69045359; SpCas9
ggtggctcacatccagcattttggg

SEQ ID NO: 44174 - DNA, 24 bp, Artificial Sequence
  Synthetic: FXN 3 forward 9:69045332-69045359; SpCas9
gtggctcacatccagcattttggg

SEQ ID NO: 44175 - DNA, 23 bp, Artificial Sequence
  Synthetic: FXN 3 forward 9:69045333-69045359; SpCas9
tggctcacatccagcattttggg

SEQ ID NO: 44176 - DNA, 22 bp, Artificial Sequence
  Synthetic: FXN 3 forward 9:69045334-69045359; SpCas9
ggctcacatccagcattttggg

SEQ ID NO: 44177 - DNA, 21 bp, Artificial Sequence
  Synthetic: FXN 3 forward 9:69045335-69045359; SpCas9
gctcacatccagcattttggg

SEQ ID NO: 44178 - DNA, 20 bp, Artificial Sequence
  Synthetic: FXN 3 forward 9:69045336-69045359; SpCas9
ctcacatccagcattttggg

SEQ ID NO: 44179 - DNA, 19 bp, Artificial Sequence
  Synthetic: FXN 3 forward 9:69045337-69045359; SpCas9
tcacatccagcattttggg

SEQ ID NO: 44180 - DNA, 18 bp, Artificial Sequence
  Synthetic: FXN 3 forward 9:69045338-69045359; SpCas9
cacatccagcattttggg

SEQ ID NO: 44181 - DNA, 25 bp, Artificial Sequence
  Synthetic: FXN 3 forward 9:69045336-69045364; SpCas9
ctcacatccagcattttgggaagct

SEQ ID NO: 44182 - DNA, 24 bp, Artificial Sequence
  Synthetic: FXN 3 forward 9:69045337-69045364; SpCas9
tcacatccagcattttgggaagct

SEQ ID NO: 44183 - DNA, 23 bp, Artificial Sequence
  Synthetic: FXN 3 forward 9:69045338-69045364; SpCas9
cacatccagcattttgggaagct

SEQ ID NO: 44184 - DNA, 22 bp, Artificial Sequence
  Synthetic: FXN 3 forward 9:69045339-69045364; SpCas9
acatccagcattttgggaagct

SEQ ID NO: 44185 - DNA, 21 bp, Artificial Sequence
  Synthetic: FXN 3 forward 9:69045340-69045364; SpCas9
catccagcattttgggaagct

SEQ ID NO: 44186 - DNA, 20 bp, Artificial Sequence
  Synthetic: FXN 3 forward 9:69045341-69045364; SpCas9
atccagcattttgggaagct

SEQ ID NO: 44187 - DNA, 19 bp, Artificial Sequence
  Synthetic: FXN 3 forward 9:69045342-69045364; SpCas9
tccagcattttgggaagct

SEQ ID NO: 44188 - DNA, 18 bp, Artificial Sequence
  Synthetic: FXN 3 forward 9:69045343-69045364; SpCas9
ccagcattttgggaagct

SEQ ID NO: 44189 - DNA, 25 bp, Artificial Sequence
  Synthetic: FXN 3 reverse 9:69045336-69045364; SpCas9
ctcagcttcccaaaatgctggatgt

SEQ ID NO: 44190 - DNA, 24 bp, Artificial Sequence
  Synthetic: FXN 3 reverse 9:69045337-69045364; SpCas9
tcagcttcccaaaatgctggatgt

SEQ ID NO: 44191 - DNA, 23 bp, Artificial Sequence
  Synthetic: FXN 3 reverse 9:69045338-69045364; SpCas9
cagcttcccaaaatgctggatgt

SEQ ID NO: 44192 - DNA, 22 bp, Artificial Sequence
  Synthetic: FXN 3 reverse 9:69045339-69045364; SpCas9
agcttcccaaaatgctggatgt

SEQ ID NO: 44193 - DNA, 21 bp, Artificial Sequence
  Synthetic: FXN 3 reverse 9:69045340-69045364; SpCas9
gcttcccaaaatgctggatgt

SEQ ID NO: 44194 - DNA, 20 bp, Artificial Sequence
  Synthetic: FXN 3 reverse 9:69045341-69045364; SpCas9
cttcccaaaatgctggatgt

SEQ ID NO: 44195 - DNA, 19 bp, Artificial Sequence
  Synthetic: FXN 3 reverse 9:69045342-69045364; SpCas9
ttcccaaaatgctggatgt

SEQ ID NO: 44196 - DNA, 18 bp, Artificial Sequence
  Synthetic: FXN 3 reverse 9:69045343-69045364; SpCas9
tcccaaaatgctggatgt

SEQ ID NO: 44197 - DNA, 25 bp, Artificial Sequence
  Synthetic: FXN 3 forward 9:69045337-69045365; SpCas9
tcacatccagcattttgggaagctg

SEQ ID NO: 44198 - DNA, 24 bp, Artificial Sequence
  Synthetic: FXN 3 forward 9:69045338-69045365; SpCas9
cacatccagcattttgggaagctg

SEQ ID NO: 44199 - DNA, 23 bp, Artificial Sequence
  Synthetic: FXN 3 forward 9:69045339-69045365; SpCas9
acatccagcattttgggaagctg

SEQ ID NO: 44200 - DNA, 22 bp, Artificial Sequence
  Synthetic: FXN 3 forward 9:69045340-69045365; SpCas9
catccagcattttgggaagctg

SEQ ID NO: 44201 - DNA, 21 bp, Artificial Sequence
  Synthetic: FXN 3 forward 9:69045341-69045365; SpCas9
atccagcattttgggaagctg

SEQ ID NO: 44202 - DNA, 20 bp, Artificial Sequence
  Synthetic: FXN 3 forward 9:69045342-69045365; SpCas9
tccagcattttgggaagctg

SEQ ID NO: 44203 - DNA, 19 bp, Artificial Sequence
  Synthetic: FXN 3 forward 9:69045343-69045365; SpCas9
ccagcattttgggaagctg

SEQ ID NO: 44204 - DNA, 18 bp, Artificial Sequence
  Synthetic: FXN 3 forward 9:69045344-69045365; SpCas9
cagcattttgggaagctg

SEQ ID NO: 44205 - DNA, 25 bp, Artificial Sequence
  Synthetic: FXN 3 forward 9:69045339-69045367; SpCas9
acatccagcattttgggaagctgag

SEQ ID NO: 44206 - DNA, 24 bp, Artificial Sequence
  Synthetic: FXN 3 forward 9:69045340-69045367; SpCas9
catccagcattttgggaagctgag

SEQ ID NO: 44207 - DNA, 23 bp, Artificial Sequence
  Synthetic: FXN 3 forward 9:69045341-69045367; SpCas9
atccagcattttgggaagctgag

SEQ ID NO: 44208 - DNA, 22 bp, Artificial Sequence
  Synthetic: FXN 3 forward 9:69045342-69045367; SpCas9
tccagcattttgggaagctgag

SEQ ID NO: 44209 - DNA, 21 bp, Artificial Sequence
  Synthetic: FXN 3 forward 9:69045343-69045367; SpCas9
ccagcattttgggaagctgag

SEQ ID NO: 44210 - DNA, 20 bp, Artificial Sequence
  Synthetic: FXN 3 forward 9:69045344-69045367; SpCas9
cagcattttgggaagctgag

SEQ ID NO: 44211 - DNA, 19 bp, Artificial Sequence
  Synthetic: FXN 3 forward 9:69045345-69045367; SpCas9
agcattttgggaagctgag

SEQ ID NO: 44212 - DNA, 18 bp, Artificial Sequence
  Synthetic: FXN 3 forward 9:69045346-69045367; SpCas9
gcattttgggaagctgag

SEQ ID NO: 44213 - DNA, 25 bp, Artificial Sequence
  Synthetic: FXN 3 forward 9:69045340-69045368; SpCas9
catccagcattttgggaagctgagg

SEQ ID NO: 44214 - DNA, 24 bp, Artificial Sequence
  Synthetic: FXN 3 forward 9:69045341-69045368; SpCas9
atccagcattttgggaagctgagg

SEQ ID NO: 44215 - DNA, 23 bp, Artificial Sequence
  Synthetic: FXN 3 forward 9:69045342-69045368; SpCas9
tccagcattttgggaagctgagg

SEQ ID NO: 44216 - DNA, 22 bp, Artificial Sequence
  Synthetic: FXN 3 forward 9:69045343-69045368; SpCas9
ccagcattttgggaagctgagg

SEQ ID NO: 44217 - DNA, 21 bp, Artificial Sequence
  Synthetic: FXN 3 forward 9:69045344-69045368; SpCas9
cagcattttgggaagctgagg

SEQ ID NO: 44218 - DNA, 20 bp, Artificial Sequence
  Synthetic: FXN 3 forward 9:69045345-69045368; SpCas9
agcattttgggaagctgagg

SEQ ID NO: 44219 - DNA, 19 bp, Artificial Sequence
  Synthetic: FXN 3 forward 9:69045346-69045368; SpCas9
gcattttgggaagctgagg

SEQ ID NO: 44220 - DNA, 18 bp, Artificial Sequence
  Synthetic: FXN 3 forward 9:69045347-69045368; SpCas9
cattttgggaagctgagg

SEQ ID NO: 44221 - DNA, 25 bp, Artificial Sequence
  Synthetic: FXN 3 forward 9:69045341-69045369; SpCas9
atccagcattttgggaagctgagga

SEQ ID NO: 44222 - DNA, 24 bp, Artificial Sequence
  Synthetic: FXN 3 forward 9:69045342-69045369; SpCas9
tccagcattttgggaagctgagga

SEQ ID NO: 44223 - DNA, 23 bp, Artificial Sequence
  Synthetic: FXN 3 forward 9:69045343-69045369; SpCas9
ccagcattttgggaagctgagga

SEQ ID NO: 44224 - DNA, 22 bp, Artificial Sequence
  Synthetic: FXN 3 forward 9:69045344-69045369; SpCas9
cagcattttgggaagctgagga

SEQ ID NO: 44225 - DNA, 21 bp, Artificial Sequence
  Synthetic: FXN 3 forward 9:69045345-69045369; SpCas9
agcattttgggaagctgagga

SEQ ID NO: 44226 - DNA, 20 bp, Artificial Sequence
  Synthetic: FXN 3 forward 9:69045346-69045369; SpCas9
gcattttgggaagctgagga

SEQ ID NO: 44227 - DNA, 19 bp, Artificial Sequence
  Synthetic: FXN 3 forward 9:69045347-69045369; SpCas9
cattttgggaagctgagga

SEQ ID NO: 44228 - DNA, 18 bp, Artificial Sequence
  Synthetic: FXN 3 forward 9:69045348-69045369; SpCas9
attttgggaagctgagga

SEQ ID NO: 44229 - DNA, 25 bp, Artificial Sequence
  Synthetic: FXN 3 reverse 9:69045343-69045371; SpCas9
tgccctcctcagcttcccaaaatgc

SEQ ID NO: 44230 - DNA, 24 bp, Artificial Sequence
  Synthetic: FXN 3 reverse 9:69045344-69045371; SpCas9
gccctcctcagcttcccaaaatgc

SEQ ID NO: 44231 - DNA, 23 bp, Artificial Sequence
  Synthetic: FXN 3 reverse 9:69045345-69045371; SpCas9
ccctcctcagcttcccaaaatgc

SEQ ID NO: 44232 - DNA, 22 bp, Artificial Sequence
  Synthetic: FXN 3 reverse 9:69045346-69045371; SpCas9
cctcctcagcttcccaaaatgc

SEQ ID NO: 44233 - DNA, 21 bp, Artificial Sequence
  Synthetic: FXN 3 reverse 9:69045347-69045371; SpCas9
ctcctcagcttcccaaaatgc

SEQ ID NO: 44234 - DNA, 20 bp, Artificial Sequence
  Synthetic: FXN 3 reverse 9:69045348-69045371; SpCas9
tcctcagcttcccaaaatgc

SEQ ID NO: 44235 - DNA, 19 bp, Artificial Sequence
  Synthetic: FXN 3 reverse 9:69045349-69045371; SpCas9
cctcagcttcccaaaatgc

SEQ ID NO: 44236 - DNA, 18 bp, Artificial Sequence
  Synthetic: FXN 3 reverse 9:69045350-69045371; SpCas9
ctcagcttcccaaaatgc

SEQ ID NO: 44237 - DNA, 25 bp, Artificial Sequence
  Synthetic: FXN 3 forward 9:69045344-69045372; SpCas9
cagcattttgggaagctgaggaggg

SEQ ID NO: 44238 - DNA, 24 bp, Artificial Sequence
  Synthetic: FXN 3 forward 9:69045345-69045372; SpCas9
agcattttgggaagctgaggaggg

SEQ ID NO: 44239 - DNA, 23 bp, Artificial Sequence
  Synthetic: FXN 3 forward 9:69045346-69045372; SpCas9
gcattttgggaagctgaggaggg

SEQ ID NO: 44240 - DNA, 22 bp, Artificial Sequence
  Synthetic: FXN 3 forward 9:69045347-69045372; SpCas9
cattttgggaagctgaggaggg

SEQ ID NO: 44241 - DNA, 21 bp, Artificial Sequence
  Synthetic: FXN 3 forward 9:69045348-69045372; SpCas9
attttgggaagctgaggaggg

SEQ ID NO: 44242 - DNA, 20 bp, Artificial Sequence
  Synthetic: FXN 3 forward 9:69045349-69045372; SpCas9
ttttgggaagctgaggaggg

SEQ ID NO: 44243 - DNA, 19 bp, Artificial Sequence
  Synthetic: FXN 3 forward 9:69045350-69045372; SpCas9
tttgggaagctgaggaggg

SEQ ID NO: 44244 - DNA, 18 bp, Artificial Sequence
  Synthetic: FXN 3 forward 9:69045351-69045372; SpCas9
ttgggaagctgaggaggg

SEQ ID NO: 44245 - DNA, 25 bp, Artificial Sequence
  Synthetic: FXN 3 forward 9:69045354-69045382; SpCas9
ggaagctgaggagggcagatcactt

SEQ ID NO: 44246 - DNA, 24 bp, Artificial Sequence
  Synthetic: FXN 3 forward 9:69045355-69045382; SpCas9
gaagctgaggagggcagatcactt

SEQ ID NO: 44247 - DNA, 23 bp, Artificial Sequence
  Synthetic: FXN 3 forward 9:69045356-69045382; SpCas9
aagctgaggagggcagatcactt

SEQ ID NO: 44248 - DNA, 22 bp, Artificial Sequence
  Synthetic: FXN 3 forward 9:69045357-69045382; SpCas9
agctgaggagggcagatcactt

SEQ ID NO: 44249 - DNA, 21 bp, Artificial Sequence
  Synthetic: FXN 3 forward 9:69045358-69045382; SpCas9
gctgaggagggcagatcactt

SEQ ID NO: 44250 - DNA, 20 bp, Artificial Sequence
  Synthetic: FXN 3 forward 9:69045359-69045382; SpCas9
ctgaggagggcagatcactt

SEQ ID NO: 44251 - DNA, 19 bp, Artificial Sequence
  Synthetic: FXN 3 forward 9:69045360-69045382; SpCas9
tgaggagggcagatcactt

SEQ ID NO: 44252 - DNA, 18 bp, Artificial Sequence
  Synthetic: FXN 3 forward 9:69045361-69045382; SpCas9
gaggagggcagatcactt

SEQ ID NO: 44253 - DNA, 25 bp, Artificial Sequence
  Synthetic: FXN 3 forward 9:69045355-69045383; SpCas9
gaagctgaggagggcagatcacttg

SEQ ID NO: 44254 - DNA, 24 bp, Artificial Sequence
  Synthetic: FXN 3 forward 9:69045356-69045383; SpCas9
aagctgaggagggcagatcacttg

SEQ ID NO: 44255 - DNA, 23 bp, Artificial Sequence
  Synthetic: FXN 3 forward 9:69045357-69045383; SpCas9
agctgaggagggcagatcacttg

SEQ ID NO: 44256 - DNA, 22 bp, Artificial Sequence
  Synthetic: FXN 3 forward 9:69045358-69045383; SpCas9
gctgaggagggcagatcacttg

SEQ ID NO: 44257 - DNA, 21 bp, Artificial Sequence
  Synthetic: FXN 3 forward 9:69045359-69045383; SpCas9
ctgaggagggcagatcacttg

SEQ ID NO: 44258 - DNA, 20 bp, Artificial Sequence
  Synthetic: FXN 3 forward 9:69045360-69045383; SpCas9
tgaggagggcagatcacttg

SEQ ID NO: 44259 - DNA, 19 bp, Artificial Sequence
  Synthetic: FXN 3 forward 9:69045361-69045383; SpCas9
gaggagggcagatcacttg

SEQ ID NO: 44260 - DNA, 18 bp, Artificial Sequence
  Synthetic: FXN 3 forward 9:69045362-69045383; SpCas9
aggagggcagatcacttg

SEQ ID NO: 44261 - DNA, 25 bp, Artificial Sequence
  Synthetic: FXN 3 forward 9:69045359-69045387; SpCas9
ctgaggagggcagatcacttgaggc

SEQ ID NO: 44262 - DNA, 24 bp, Artificial Sequence
  Synthetic: FXN 3 forward 9:69045360-69045387; SpCas9
tgaggagggcagatcacttgaggc

SEQ ID NO: 44263 - DNA, 23 bp, Artificial Sequence
  Synthetic: FXN 3 forward 9:69045361-69045387; SpCas9
gaggagggcagatcacttgaggc

SEQ ID NO: 44264 - DNA, 22 bp, Artificial Sequence
  Synthetic: FXN 3 forward 9:69045362-69045387; SpCas9
aggagggcagatcacttgaggc

SEQ ID NO: 44265 - DNA, 21 bp, Artificial Sequence
  Synthetic: FXN 3 forward 9:69045363-69045387; SpCas9
ggagggcagatcacttgaggc

SEQ ID NO: 44266 - DNA, 20 bp, Artificial Sequence
  Synthetic: FXN 3 forward 9:69045364-69045387; SpCas9
gagggcagatcacttgaggc

SEQ ID NO: 44267 - DNA, 19 bp, Artificial Sequence
  Synthetic: FXN 3 forward 9:69045365-69045387; SpCas9
agggcagatcacttgaggc

SEQ ID NO: 44268 - DNA, 18 bp, Artificial Sequence
  Synthetic: FXN 3 forward 9:69045366-69045387; SpCas9
gggcagatcacttgaggc

SEQ ID NO: 44269 - DNA, 25 bp, Artificial Sequence
  Synthetic: FXN 3 reverse 9:69045359-69045387; SpCas9
ctggcctcaagtgatctgccctcct

SEQ ID NO: 44270 - DNA, 24 bp, Artificial Sequence
  Synthetic: FXN 3 reverse 9:69045360-69045387; SpCas9
tggcctcaagtgatctgccctcct

SEQ ID NO: 44271 - DNA, 23 bp, Artificial Sequence
  Synthetic: FXN 3 reverse 9:69045361-69045387; SpCas9
ggcctcaagtgatctgccctcct

SEQ ID NO: 44272 - DNA, 22 bp, Artificial Sequence
  Synthetic: FXN 3 reverse 9:69045362-69045387; SpCas9
gcctcaagtgatctgccctcct

SEQ ID NO: 44273 - DNA, 21 bp, Artificial Sequence
  Synthetic: FXN 3 reverse 9:69045363-69045387; SpCas9
cctcaagtgatctgccctcct

SEQ ID NO: 44274 - DNA, 20 bp, Artificial Sequence
  Synthetic: FXN 3 reverse 9:69045364-69045387; SpCas9
ctcaagtgatctgccctcct

SEQ ID NO: 44275 - DNA, 19 bp, Artificial Sequence
  Synthetic: FXN 3 reverse 9:69045365-69045387; SpCas9
tcaagtgatctgccctcct

SEQ ID NO: 44276 - DNA, 18 bp, Artificial Sequence
  Synthetic: FXN 3 reverse 9:69045366-69045387; SpCas9
caagtgatctgccctcct

SEQ ID NO: 44277 - DNA, 25 bp, Artificial Sequence
  Synthetic: FXN 3 forward 9:69045360-69045388; SpCas9
tgaggagggcagatcacttgaggcc

SEQ ID NO: 44278 - DNA, 24 bp, Artificial Sequence
  Synthetic: FXN 3 forward 9:69045361-69045388; SpCas9
gaggagggcagatcacttgaggcc

SEQ ID NO: 44279 - DNA, 23 bp, Artificial Sequence
  Synthetic: FXN 3 forward 9:69045362-69045388; SpCas9
aggagggcagatcacttgaggcc

SEQ ID NO: 44280 - DNA, 22 bp, Artificial Sequence
  Synthetic: FXN 3 forward 9:69045363-69045388; SpCas9
ggagggcagatcacttgaggcc

SEQ ID NO: 44281 - DNA, 21 bp, Artificial Sequence
  Synthetic: FXN 3 forward 9:69045364-69045388; SpCas9
gagggcagatcacttgaggcc

SEQ ID NO: 44282 - DNA, 20 bp, Artificial Sequence
  Synthetic: FXN 3 forward 9:69045365-69045388; SpCas9
agggcagatcacttgaggcc

SEQ ID NO: 44283 - DNA, 19 bp, Artificial Sequence
  Synthetic: FXN 3 forward 9:69045366-69045388; SpCas9
gggcagatcacttgaggcc

SEQ ID NO: 44284 - DNA, 18 bp, Artificial Sequence
  Synthetic: FXN 3 forward 9:69045367-69045388; SpCas9
ggcagatcacttgaggcc

SEQ ID NO: 44285 - DNA, 25 bp, Artificial Sequence
  Synthetic: FXN 3 forward 9:69045362-69045390; SpCas9
aggagggcagatcacttgaggccag

SEQ ID NO: 44286 - DNA, 24 bp, Artificial Sequence
  Synthetic: FXN 3 forward 9:69045363-69045390; SpCas9
ggagggcagatcacttgaggccag

SEQ ID NO: 44287 - DNA, 23 bp, Artificial Sequence
  Synthetic: FXN 3 forward 9:69045364-69045390; SpCas9
gagggcagatcacttgaggccag

SEQ ID NO: 44288 - DNA, 22 bp, Artificial Sequence
  Synthetic: FXN 3 forward 9:69045365-69045390; SpCas9
agggcagatcacttgaggccag

SEQ ID NO: 44289 - DNA, 21 bp, Artificial Sequence
  Synthetic: FXN 3 forward 9:69045366-69045390; SpCas9
gggcagatcacttgaggccag

SEQ ID NO: 44290 - DNA, 20 bp, Artificial Sequence
  Synthetic: FXN 3 forward 9:69045367-69045390; SpCas9
ggcagatcacttgaggccag

SEQ ID NO: 44291 - DNA, 19 bp, Artificial Sequence
  Synthetic: FXN 3 forward 9:69045368-69045390; SpCas9
gcagatcacttgaggccag

SEQ ID NO: 44292 - DNA, 18 bp, Artificial Sequence
  Synthetic: FXN 3 forward 9:69045369-69045390; SpCas9
cagatcacttgaggccag

SEQ ID NO: 44293 - DNA, 25 bp, Artificial Sequence
  Synthetic: FXN 3 forward 9:69045368-69045396; SpCas9
gcagatcacttgaggccaggagttc

SEQ ID NO: 44294 - DNA, 24 bp, Artificial Sequence
  Synthetic: FXN 3 forward 9:69045369-69045396; SpCas9
cagatcacttgaggccaggagttc

SEQ ID NO: 44295 - DNA, 23 bp, Artificial Sequence
  Synthetic: FXN 3 forward 9:69045370-69045396; SpCas9
agatcacttgaggccaggagttc

SEQ ID NO: 44296 - DNA, 22 bp, Artificial Sequence
  Synthetic: FXN 3 forward 9:69045371-69045396; SpCas9
gatcacttgaggccaggagttc

SEQ ID NO: 44297 - DNA, 21 bp, Artificial Sequence
  Synthetic: FXN 3 forward 9:69045372-69045396; SpCas9
atcacttgaggccaggagttc

SEQ ID NO: 44298 - DNA, 20 bp, Artificial Sequence
  Synthetic: FXN 3 forward 9:69045373-69045396; SpCas9
tcacttgaggccaggagttc

SEQ ID NO: 44299 - DNA, 19 bp, Artificial Sequence
  Synthetic: FXN 3 forward 9:69045374-69045396; SpCas9
cacttgaggccaggagttc

SEQ ID NO: 44300 - DNA, 18 bp, Artificial Sequence
  Synthetic: FXN 3 forward 9:69045375-69045396; SpCas9
acttgaggccaggagttc

SEQ ID NO: 44301 - DNA, 25 bp, Artificial Sequence
  Synthetic: FXN 3 forward 9:69045373-69045401; SpCas9
tcacttgaggccaggagttcaagac

SEQ ID NO: 44302 - DNA, 24 bp, Artificial Sequence
  Synthetic: FXN 3 forward 9:69045374-69045401; SpCas9
cacttgaggccaggagttcaagac

SEQ ID NO: 44303 - DNA, 23 bp, Artificial Sequence
  Synthetic: FXN 3 forward 9:69045375-69045401; SpCas9
acttgaggccaggagttcaagac

SEQ ID NO: 44304 - DNA, 22 bp, Artificial Sequence
  Synthetic: FXN 3 forward 9:69045376-69045401; SpCas9
cttgaggccaggagttcaagac

SEQ ID NO: 44305 - DNA, 21 bp, Artificial Sequence
  Synthetic: FXN 3 forward 9:69045377-69045401; SpCas9
ttgaggccaggagttcaagac

SEQ ID NO: 44306 - DNA, 20 bp, Artificial Sequence
  Synthetic: FXN 3 forward 9:69045378-69045401; SpCas9
tgaggccaggagttcaagac

SEQ ID NO: 44307 - DNA, 19 bp, Artificial Sequence
  Synthetic: FXN 3 forward 9:69045379-69045401; SpCas9
gaggccaggagttcaagac

SEQ ID NO: 44308 - DNA, 18 bp, Artificial Sequence
  Synthetic: FXN 3 forward 9:69045380-69045401; SpCas9
aggccaggagttcaagac

SEQ ID NO: 44309 - DNA, 25 bp, Artificial Sequence
  Synthetic: FXN 3 reverse 9:69045376-69045404; SpCas9
aggctggtcttgaactcctggcctc

SEQ ID NO: 44310 - DNA, 24 bp, Artificial Sequence
  Synthetic: FXN 3 reverse 9:69045377-69045404; SpCas9
ggctggtcttgaactcctggcctc

SEQ ID NO: 44311 - DNA, 23 bp, Artificial Sequence
  Synthetic: FXN 3 reverse 9:69045378-69045404; SpCas9
gctggtcttgaactcctggcctc

SEQ ID NO: 44312 - DNA, 22 bp, Artificial Sequence
  Synthetic: FXN 3 reverse 9:69045379-69045404; SpCas9
ctggtcttgaactcctggcctc

SEQ ID NO: 44313 - DNA, 21 bp, Artificial Sequence
  Synthetic: FXN 3 reverse 9:69045380-69045404; SpCas9
tggtcttgaactcctggcctc

SEQ ID NO: 44314 - DNA, 20 bp, Artificial Sequence
  Synthetic: FXN 3 reverse 9:69045381-69045404; SpCas9
ggtcttgaactcctggcctc

SEQ ID NO: 44315 - DNA, 19 bp, Artificial Sequence
  Synthetic: FXN 3 reverse 9:69045382-69045404; SpCas9
gtcttgaactcctggcctc

SEQ ID NO: 44316 - DNA, 18 bp, Artificial Sequence
  Synthetic: FXN 3 reverse 9:69045383-69045404; SpCas9
tcttgaactcctggcctc

SEQ ID NO: 44317 - DNA, 25 bp, Artificial Sequence
  Synthetic: FXN 3 forward 9:69045378-69045406; SpCas9
tgaggccaggagttcaagaccagcc

SEQ ID NO: 44318 - DNA, 24 bp, Artificial Sequence
  Synthetic: FXN 3 forward 9:69045379-69045406; SpCas9
gaggccaggagttcaagaccagcc

SEQ ID NO: 44319 - DNA, 23 bp, Artificial Sequence
  Synthetic: FXN 3 forward 9:69045380-69045406; SpCas9
aggccaggagttcaagaccagcc

SEQ ID NO: 44320 - DNA, 22 bp, Artificial Sequence
  Synthetic: FXN 3 forward 9:69045381-69045406; SpCas9
ggccaggagttcaagaccagcc

SEQ ID NO: 44321 - DNA, 21 bp, Artificial Sequence
  Synthetic: FXN 3 forward 9:69045382-69045406; SpCas9
gccaggagttcaagaccagcc

SEQ ID NO: 44322 - DNA, 20 bp, Artificial Sequence
  Synthetic: FXN 3 forward 9:69045383-69045406; SpCas9
ccaggagttcaagaccagcc

SEQ ID NO: 44323 - DNA, 19 bp, Artificial Sequence
  Synthetic: FXN 3 forward 9:69045384-69045406; SpCas9
caggagttcaagaccagcc

SEQ ID NO: 44324 - DNA, 18 bp, Artificial Sequence
  Synthetic: FXN 3 forward 9:69045385-69045406; SpCas9
aggagttcaagaccagcc

SEQ ID NO: 44325 - DNA, 25 bp, Artificial Sequence
  Synthetic: FXN 3 reverse 9:69045383-69045411; SpCas9
gttggccaggctggtcttgaactcc

SEQ ID NO: 44326 - DNA, 24 bp, Artificial Sequence
  Synthetic: FXN 3 reverse 9:69045384-69045411; SpCas9
ttggccaggctggtcttgaactcc

SEQ ID NO: 44327 - DNA, 23 bp, Artificial Sequence
  Synthetic: FXN 3 reverse 9:69045385-69045411; SpCas9
tggccaggctggtcttgaactcc

SEQ ID NO: 44328 - DNA, 22 bp, Artificial Sequence
  Synthetic: FXN 3 reverse 9:69045386-69045411; SpCas9
ggccaggctggtcttgaactcc

SEQ ID NO: 44329 - DNA, 21 bp, Artificial Sequence
  Synthetic: FXN 3 reverse 9:69045387-69045411; SpCas9
gccaggctggtcttgaactcc

SEQ ID NO: 44330 - DNA, 20 bp, Artificial Sequence
  Synthetic: FXN 3 reverse 9:69045388-69045411; SpCas9
ccaggctggtcttgaactcc

SEQ ID NO: 44331 - DNA, 19 bp, Artificial Sequence
  Synthetic: FXN 3 reverse 9:69045389-69045411; SpCas9
caggctggtcttgaactcc

SEQ ID NO: 44332 - DNA, 18 bp, Artificial Sequence
  Synthetic: FXN 3 reverse 9:69045390-69045411; SpCas9
aggctggtcttgaactcc

SEQ ID NO: 44333 - DNA, 25 bp, Artificial Sequence
  Synthetic: FXN 3 forward 9:69045387-69045415; SpCas9
gagttcaagaccagcctggccaaca

SEQ ID NO: 44334 - DNA, 24 bp, Artificial Sequence
  Synthetic: FXN 3 forward 9:69045388-69045415; SpCas9
agttcaagaccagcctggccaaca

SEQ ID NO: 44335 - DNA, 23 bp, Artificial Sequence
  Synthetic: FXN 3 forward 9:69045389-69045415; SpCas9
gttcaagaccagcctggccaaca

SEQ ID NO: 44336 - DNA, 22 bp, Artificial Sequence
  Synthetic: FXN 3 forward 9:69045390-69045415; SpCas9
ttcaagaccagcctggccaaca

SEQ ID NO: 44337 - DNA, 21 bp, Artificial Sequence
  Synthetic: FXN 3 forward 9:69045391-69045415; SpCas9
tcaagaccagcctggccaaca

SEQ ID NO: 44338 - DNA, 20 bp, Artificial Sequence
  Synthetic: FXN 3 forward 9:69045392-69045415; SpCas9
caagaccagcctggccaaca

SEQ ID NO: 44339 - DNA, 19 bp, Artificial Sequence
  Synthetic: FXN 3 forward 9:69045393-69045415; SpCas9
aagaccagcctggccaaca

SEQ ID NO: 44340 - DNA, 18 bp, Artificial Sequence
  Synthetic: FXN 3 forward 9:69045394-69045415; SpCas9
agaccagcctggccaaca

SEQ ID NO: 44341 - DNA, 25 bp, Artificial Sequence
  Synthetic: FXN 3 reverse 9:69045397-69045425; SpCas9
cggggtttcaccatgttggccaggc

SEQ ID NO: 44342 - DNA, 24 bp, Artificial Sequence
  Synthetic: FXN 3 reverse 9:69045398-69045425; SpCas9
ggggtttcaccatgttggccaggc

SEQ ID NO: 44343 - DNA, 23 bp, Artificial Sequence
  Synthetic: FXN 3 reverse 9:69045399-69045425; SpCas9
gggtttcaccatgttggccaggc

SEQ ID NO: 44344 - DNA, 22 bp, Artificial Sequence
  Synthetic: FXN 3 reverse 9:69045400-69045425; SpCas9
ggtttcaccatgttggccaggc

SEQ ID NO: 44345 - DNA, 21 bp, Artificial Sequence
  Synthetic: FXN 3 reverse 9:69045401-69045425; SpCas9
gtttcaccatgttggccaggc

SEQ ID NO: 44346 - DNA, 20 bp, Artificial Sequence
  Synthetic: FXN 3 reverse 9:69045402-69045425; SpCas9
tttcaccatgttggccaggc

SEQ ID NO: 44347 - DNA, 19 bp, Artificial Sequence
  Synthetic: FXN 3 reverse 9:69045403-69045425; SpCas9
ttcaccatgttggccaggc

SEQ ID NO: 44348 - DNA, 18 bp, Artificial Sequence
  Synthetic: FXN 3 reverse 9:69045404-69045425; SpCas9
tcaccatgttggccaggc

SEQ ID NO: 44349 - DNA, 25 bp, Artificial Sequence
  Synthetic: FXN 3 reverse 9:69045401-69045429; SpCas9
gagacggggtttcaccatgttggcc

SEQ ID NO: 44350 - DNA, 24 bp, Artificial Sequence
  Synthetic: FXN 3 reverse 9:69045402-69045429; SpCas9
agacggggtttcaccatgttggcc

SEQ ID NO: 44351 - DNA, 23 bp, Artificial Sequence
  Synthetic: FXN 3 reverse 9:69045403-69045429; SpCas9
gacggggtttcaccatgttggcc

SEQ ID NO: 44352 - DNA, 22 bp, Artificial Sequence
  Synthetic: FXN 3 reverse 9:69045404-69045429; SpCas9
acggggtttcaccatgttggcc

SEQ ID NO: 44353 - DNA, 21 bp, Artificial Sequence
  Synthetic: FXN 3 reverse 9:69045405-69045429; SpCas9
cggggtttcaccatgttggcc

SEQ ID NO: 44354 - DNA, 20 bp, Artificial Sequence
  Synthetic: FXN 3 reverse 9:69045406-69045429; SpCas9
ggggtttcaccatgttggcc

SEQ ID NO: 44355 - DNA, 19 bp, Artificial Sequence
  Synthetic: FXN 3 reverse 9:69045407-69045429; SpCas9
gggtttcaccatgttggcc

SEQ ID NO: 44356 - DNA, 18 bp, Artificial Sequence
  Synthetic: FXN 3 reverse 9:69045408-69045429; SpCas9
ggtttcaccatgttggcc

SEQ ID NO: 44357 - DNA, 25 bp, Artificial Sequence
  Synthetic: FXN 3 reverse 9:69045402-69045430; SpCas9
agagacggggtttcaccatgttggc

SEQ ID NO: 44358 - DNA, 24 bp, Artificial Sequence
  Synthetic: FXN 3 reverse 9:69045403-69045430; SpCas9
gagacggggtttcaccatgttggc

SEQ ID NO: 44359 - DNA, 23 bp, Artificial Sequence
  Synthetic: FXN 3 reverse 9:69045404-69045430; SpCas9
agacggggtttcaccatgttggc

SEQ ID NO: 44360 - DNA, 22 bp, Artificial Sequence
  Synthetic: FXN 3 reverse 9:69045405-69045430; SpCas9
gacggggtttcaccatgttggc

SEQ ID NO: 44361 - DNA, 21 bp, Artificial Sequence
  Synthetic: FXN 3 reverse 9:69045406-69045430; SpCas9
acggggtttcaccatgttggc

SEQ ID NO: 44362 - DNA, 20 bp, Artificial Sequence
  Synthetic: FXN 3 reverse 9:69045407-69045430; SpCas9
cggggtttcaccatgttggc

SEQ ID NO: 44363 - DNA, 19 bp, Artificial Sequence
  Synthetic: FXN 3 reverse 9:69045408-69045430; SpCas9
ggggtttcaccatgttggc

SEQ ID NO: 44364 - DNA, 18 bp, Artificial Sequence
  Synthetic: FXN 3 reverse 9:69045409-69045430; SpCas9
gggtttcaccatgttggc

SEQ ID NO: 44365 - DNA, 25 bp, Artificial Sequence
  Synthetic: FXN 3 reverse 9:69045406-69045434; SpCas9
tagtagagacggggtttcaccatgt

SEQ ID NO: 44366 - DNA, 24 bp, Artificial Sequence
  Synthetic: FXN 3 reverse 9:69045407-69045434; SpCas9
agtagagacggggtttcaccatgt

SEQ ID NO: 44367 - DNA, 23 bp, Artificial Sequence
  Synthetic: FXN 3 reverse 9:69045408-69045434; SpCas9
gtagagacggggtttcaccatgt

SEQ ID NO: 44368 - DNA, 22 bp, Artificial Sequence
  Synthetic: FXN 3 reverse 9:69045409-69045434; SpCas9
tagagacggggtttcaccatgt

SEQ ID NO: 44369 - DNA, 21 bp, Artificial Sequence
  Synthetic: FXN 3 reverse 9:69045410-69045434; SpCas9
agagacggggtttcaccatgt

SEQ ID NO: 44370 - DNA, 20 bp, Artificial Sequence
  Synthetic: FXN 3 reverse 9:69045411-69045434; SpCas9
gagacggggtttcaccatgt

SEQ ID NO: 44371 - DNA, 19 bp, Artificial Sequence
  Synthetic: FXN 3 reverse 9:69045412-69045434; SpCas9
agacggggtttcaccatgt

SEQ ID NO: 44372 - DNA, 18 bp, Artificial Sequence
  Synthetic: FXN 3 reverse 9:69045413-69045434; SpCas9
gacggggtttcaccatgt

SEQ ID NO: 44373 - DNA, 25 bp, Artificial Sequence
  Synthetic: FXN 3 reverse 9:69045420-69045448; SpCas9
attttttgtatttttagtagagacg

SEQ ID NO: 44374 - DNA, 24 bp, Artificial Sequence
  Synthetic: FXN 3 reverse 9:69045421-69045448; SpCas9
ttttttgtatttttagtagagacg

SEQ ID NO: 44375 - DNA, 23 bp, Artificial Sequence
  Synthetic: FXN 3 reverse 9:69045422-69045448; SpCas9
tttttgtatttttagtagagacg

SEQ ID NO: 44376 - DNA, 22 bp, Artificial Sequence
  Synthetic: FXN 3 reverse 9:69045423-69045448; SpCas9
ttttgtatttttagtagagacg

SEQ ID NO: 44377 - DNA, 21 bp, Artificial Sequence
  Synthetic: FXN 3 reverse 9:69045424-69045448; SpCas9
tttgtatttttagtagagacg

SEQ ID NO: 44378 - DNA, 20 bp, Artificial Sequence
  Synthetic: FXN 3 reverse 9:69045425-69045448; SpCas9
ttgtatttttagtagagacg

SEQ ID NO: 44379 - DNA, 19 bp, Artificial Sequence
  Synthetic: FXN 3 reverse 9:69045426-69045448; SpCas9
tgtatttttagtagagacg

SEQ ID NO: 44380 - DNA, 18 bp, Artificial Sequence
  Synthetic: FXN 3 reverse 9:69045427-69045448; SpCas9
gtatttttagtagagacg

SEQ ID NO: 44381 - DNA, 25 bp, Artificial Sequence
  Synthetic: FXN 3 reverse 9:69045421-69045449; SpCas9
gattttttgtatttttagtagagac

SEQ ID NO: 44382 - DNA, 24 bp, Artificial Sequence
  Synthetic: FXN 3 reverse 9:69045422-69045449; SpCas9
attttttgtatttttagtagagac

SEQ ID NO: 44383 - DNA, 23 bp, Artificial Sequence
  Synthetic: FXN 3 reverse 9:69045423-69045449; SpCas9
ttttttgtatttttagtagagac

SEQ ID NO: 44384 - DNA, 22 bp, Artificial Sequence
  Synthetic: FXN 3 reverse 9:69045424-69045449; SpCas9
tttttgtatttttagtagagac

SEQ ID NO: 44385 - DNA, 21 bp, Artificial Sequence
  Synthetic: FXN 3 reverse 9:69045425-69045449; SpCas9
ttttgtatttttagtagagac

SEQ ID NO: 44386 - DNA, 20 bp, Artificial Sequence
  Synthetic: FXN 3 reverse 9:69045426-69045449; SpCas9
tttgtatttttagtagagac

SEQ ID NO: 44387 - DNA, 19 bp, Artificial Sequence
  Synthetic: FXN 3 reverse 9:69045427-69045449; SpCas9
ttgtatttttagtagagac

SEQ ID NO: 44388 - DNA, 18 bp, Artificial Sequence
  Synthetic: FXN 3 reverse 9:69045428-69045449; SpCas9
tgtatttttagtagagac

SEQ ID NO: 44389 - DNA, 25 bp, Artificial Sequence
  Synthetic: FXN 3 reverse 9:69045422-69045450; SpCas9
cgattttttgtatttttagtagaga

SEQ ID NO: 44390 - DNA, 24 bp, Artificial Sequence
  Synthetic: FXN 3 reverse 9:69045423-69045450; SpCas9
gattttttgtatttttagtagaga

SEQ ID NO: 44391 - DNA, 23 bp, Artificial Sequence
  Synthetic: FXN 3 reverse 9:69045424-69045450; SpCas9
attttttgtatttttagtagaga

SEQ ID NO: 44392 - DNA, 22 bp, Artificial Sequence
  Synthetic: FXN 3 reverse 9:69045425-69045450; SpCas9
ttttttgtatttttagtagaga

SEQ ID NO: 44393 - DNA, 21 bp, Artificial Sequence
  Synthetic: FXN 3 reverse 9:69045426-69045450; SpCas9
tttttgtatttttagtagaga

SEQ ID NO: 44394 - DNA, 20 bp, Artificial Sequence
  Synthetic: FXN 3 reverse 9:69045427-69045450; SpCas9
ttttgtatttttagtagaga

SEQ ID NO: 44395 - DNA, 19 bp, Artificial Sequence
  Synthetic: FXN 3 reverse 9:69045428-69045450; SpCas9
tttgtatttttagtagaga

SEQ ID NO: 44396 - DNA, 18 bp, Artificial Sequence
  Synthetic: FXN 3 reverse 9:69045429-69045450; SpCas9
ttgtatttttagtagaga

SEQ ID NO: 44397 - DNA, 25 bp, Artificial Sequence
  Synthetic: FXN 3 forward 9:69045423-69045451; SpCas9
cgtctctactaaaaatacaaaaaat

SEQ ID NO: 44398 - DNA, 24 bp, Artificial Sequence
  Synthetic: FXN 3 forward 9:69045424-69045451; SpCas9
gtctctactaaaaatacaaaaaat

SEQ ID NO: 44399 - DNA, 23 bp, Artificial Sequence
  Synthetic: FXN 3 forward 9:69045425-69045451; SpCas9
tctctactaaaaatacaaaaaat

SEQ ID NO: 44400 - DNA, 22 bp, Artificial Sequence
  Synthetic: FXN 3 forward 9:69045426-69045451; SpCas9
ctctactaaaaatacaaaaaat

SEQ ID NO: 44401 - DNA, 21 bp, Artificial Sequence
  Synthetic: FXN 3 forward 9:69045427-69045451; SpCas9
tctactaaaaatacaaaaaat

SEQ ID NO: 44402 - DNA, 20 bp, Artificial Sequence
  Synthetic: FXN 3 forward 9:69045428-69045451; SpCas9
ctactaaaaatacaaaaaat

SEQ ID NO: 44403 - DNA, 19 bp, Artificial Sequence
  Synthetic: FXN 3 forward 9:69045429-69045451; SpCas9
tactaaaaatacaaaaaat

SEQ ID NO: 44404 - DNA, 18 bp, Artificial Sequence
  Synthetic: FXN 3 forward 9:69045430-69045451; SpCas9
actaaaaatacaaaaaat

SEQ ID NO: 44405 - DNA, 25 bp, Artificial Sequence
  Synthetic: FXN 3 forward 9:69045424-69045452; SpCas9
gtctctactaaaaatacaaaaaatc

SEQ ID NO: 44406 - DNA, 24 bp, Artificial Sequence
  Synthetic: FXN 3 forward 9:69045425-69045452; SpCas9
tctctactaaaaatacaaaaaatc

SEQ ID NO: 44407 - DNA, 23 bp, Artificial Sequence
  Synthetic: FXN 3 forward 9:69045426-69045452; SpCas9
ctctactaaaaatacaaaaaatc

SEQ ID NO: 44408 - DNA, 22 bp, Artificial Sequence
  Synthetic: FXN 3 forward 9:69045427-69045452; SpCas9
tctactaaaaatacaaaaaatc

SEQ ID NO: 44409 - DNA, 21 bp, Artificial Sequence
  Synthetic: FXN 3 forward 9:69045428-69045452; SpCas9
ctactaaaaatacaaaaaatc

SEQ ID NO: 44410 - DNA, 20 bp, Artificial Sequence
  Synthetic: FXN 3 forward 9:69045429-69045452; SpCas9
tactaaaaatacaaaaaatc

SEQ ID NO: 44411 - DNA, 19 bp, Artificial Sequence
  Synthetic: FXN 3 forward 9:69045430-69045452; SpCas9
actaaaaatacaaaaaatc

SEQ ID NO: 44412 - DNA, 18 bp, Artificial Sequence
  Synthetic: FXN 3 forward 9:69045431-69045452; SpCas9
ctaaaaatacaaaaaatc

SEQ ID NO: 44413 - DNA, 25 bp, Artificial Sequence
  Synthetic: FXN 3 reverse 9:69045426-69045454; SpCas9
cacccgattttttgtatttttagta

SEQ ID NO: 44414 - DNA, 24 bp, Artificial Sequence
  Synthetic: FXN 3 reverse 9:69045427-69045454; SpCas9
acccgattttttgtatttttagta

SEQ ID NO: 44415 - DNA, 23 bp, Artificial Sequence
  Synthetic: FXN 3 reverse 9:69045428-69045454; SpCas9
cccgattttttgtatttttagta

SEQ ID NO: 44416 - DNA, 22 bp, Artificial Sequence
  Synthetic: FXN 3 reverse 9:69045429-69045454; SpCas9
ccgattttttgtatttttagta

SEQ ID NO: 44417 - DNA, 21 bp, Artificial Sequence
  Synthetic: FXN 3 reverse 9:69045430-69045454; SpCas9
cgattttttgtatttttagta

SEQ ID NO: 44418 - DNA, 20 bp, Artificial Sequence
  Synthetic: FXN 3 reverse 9:69045431-69045454; SpCas9
gattttttgtatttttagta

SEQ ID NO: 44419 - DNA, 19 bp, Artificial Sequence
  Synthetic: FXN 3 reverse 9:69045432-69045454; SpCas9
attttttgtatttttagta

SEQ ID NO: 44420 - DNA, 18 bp, Artificial Sequence
  Synthetic: FXN 3 reverse 9:69045433-69045454; SpCas9
ttttttgtatttttagta

SEQ ID NO: 44421 - DNA, 25 bp, Artificial Sequence
  Synthetic: FXN 3 reverse 9:69045428-69045456; SpCas9
cgcacccgattttttgtatttttag

SEQ ID NO: 44422 - DNA, 24 bp, Artificial Sequence
  Synthetic: FXN 3 reverse 9:69045429-69045456; SpCas9
gcacccgattttttgtatttttag

SEQ ID NO: 44423 - DNA, 23 bp, Artificial Sequence
  Synthetic: FXN 3 reverse 9:69045430-69045456; SpCas9
cacccgattttttgtatttttag

SEQ ID NO: 44424 - DNA, 22 bp, Artificial Sequence
  Synthetic: FXN 3 reverse 9:69045431-69045456; SpCas9
acccgattttttgtatttttag

SEQ ID NO: 44425 - DNA, 21 bp, Artificial Sequence
  Synthetic: FXN 3 reverse 9:69045432-69045456; SpCas9
cccgattttttgtatttttag

SEQ ID NO: 44426 - DNA, 20 bp, Artificial Sequence
  Synthetic: FXN 3 reverse 9:69045433-69045456; SpCas9
ccgattttttgtatttttag

SEQ ID NO: 44427 - DNA, 19 bp, Artificial Sequence
  Synthetic: FXN 3 reverse 9:69045434-69045456; SpCas9
cgattttttgtatttttag

SEQ ID NO: 44428 - DNA, 18 bp, Artificial Sequence
  Synthetic: FXN 3 reverse 9:69045435-69045456; SpCas9
gattttttgtatttttag

SEQ ID NO: 44429 - DNA, 25 bp, Artificial Sequence
  Synthetic: FXN 3 forward 9:69045429-69045457; SpCas9
tactaaaaatacaaaaaatcgggtg

SEQ ID NO: 44430 - DNA, 24 bp, Artificial Sequence
  Synthetic: FXN 3 forward 9:69045430-69045457; SpCas9
actaaaaatacaaaaaatcgggtg

SEQ ID NO: 44431 - DNA, 23 bp, Artificial Sequence
  Synthetic: FXN 3 forward 9:69045431-69045457; SpCas9
ctaaaaatacaaaaaatcgggtg

SEQ ID NO: 44432 - DNA, 22 bp, Artificial Sequence
  Synthetic: FXN 3 forward 9:69045432-69045457; SpCas9
taaaaatacaaaaaatcgggtg

SEQ ID NO: 44433 - DNA, 21 bp, Artificial Sequence
  Synthetic: FXN 3 forward 9:69045433-69045457; SpCas9
aaaaatacaaaaaatcgggtg

SEQ ID NO: 44434 - DNA, 20 bp, Artificial Sequence
  Synthetic: FXN 3 forward 9:69045434-69045457; SpCas9
aaaatacaaaaaatcgggtg

SEQ ID NO: 44435 - DNA, 19 bp, Artificial Sequence
  Synthetic: FXN 3 forward 9:69045435-69045457; SpCas9
aaatacaaaaaatcgggtg

SEQ ID NO: 44436 - DNA, 18 bp, Artificial Sequence
  Synthetic: FXN 3 forward 9:69045436-69045457; SpCas9
aatacaaaaaatcgggtg

SEQ ID NO: 44437 - DNA, 25 bp, Artificial Sequence
  Synthetic: FXN 3 reverse 9:69045431-69045459; SpCas9
caccgcacccgattttttgtatttt

SEQ ID NO: 44438 - DNA, 24 bp, Artificial Sequence
  Synthetic: FXN 3 reverse 9:69045432-69045459; SpCas9
accgcacccgattttttgtatttt

SEQ ID NO: 44439 - DNA, 23 bp, Artificial Sequence
  Synthetic: FXN 3 reverse 9:69045433-69045459; SpCas9
ccgcacccgattttttgtatttt

SEQ ID NO: 44440 - DNA, 22 bp, Artificial Sequence
  Synthetic: FXN 3 reverse 9:69045434-69045459; SpCas9
cgcacccgattttttgtatttt

SEQ ID NO: 44441 - DNA, 21 bp, Artificial Sequence
  Synthetic: FXN 3 reverse 9:69045435-69045459; SpCas9
gcacccgattttttgtatttt

SEQ ID NO: 44442 - DNA, 20 bp, Artificial Sequence
  Synthetic: FXN 3 reverse 9:69045436-69045459; SpCas9
cacccgattttttgtatttt

SEQ ID NO: 44443 - DNA, 19 bp, Artificial Sequence
  Synthetic: FXN 3 reverse 9:69045437-69045459; SpCas9
acccgattttttgtatttt

SEQ ID NO: 44444 - DNA, 18 bp, Artificial Sequence
  Synthetic: FXN 3 reverse 9:69045438-69045459; SpCas9
cccgattttttgtatttt

SEQ ID NO: 44445 - DNA, 25 bp, Artificial Sequence
  Synthetic: FXN 3 forward 9:69045432-69045460; SpCas9
taaaaatacaaaaaatcgggtgcgg

SEQ ID NO: 44446 - DNA, 24 bp, Artificial Sequence
  Synthetic: FXN 3 forward 9:69045433-69045460; SpCas9
aaaaatacaaaaaatcgggtgcgg

SEQ ID NO: 44447 - DNA, 23 bp, Artificial Sequence
  Synthetic: FXN 3 forward 9:69045434-69045460; SpCas9
aaaatacaaaaaatcgggtgcgg

SEQ ID NO: 44448 - DNA, 22 bp, Artificial Sequence
  Synthetic: FXN 3 forward 9:69045435-69045460; SpCas9
aaatacaaaaaatcgggtgcgg

SEQ ID NO: 44449 - DNA, 21 bp, Artificial Sequence
  Synthetic: FXN 3 forward 9:69045436-69045460; SpCas9
aatacaaaaaatcgggtgcgg

SEQ ID NO: 44450 - DNA, 20 bp, Artificial Sequence
  Synthetic: FXN 3 forward 9:69045437-69045460; SpCas9
atacaaaaaatcgggtgcgg

SEQ ID NO: 44451 - DNA, 19 bp, Artificial Sequence
  Synthetic: FXN 3 forward 9:69045438-69045460; SpCas9
tacaaaaaatcgggtgcgg

SEQ ID NO: 44452 - DNA, 18 bp, Artificial Sequence
  Synthetic: FXN 3 forward 9:69045439-69045460; SpCas9
acaaaaaatcgggtgcgg

SEQ ID NO: 44453 - DNA, 25 bp, Artificial Sequence
  Synthetic: FXN 3 forward 9:69045435-69045463; SpCas9
aaatacaaaaaatcgggtgcggtgg

SEQ ID NO: 44454 - DNA, 24 bp, Artificial Sequence
  Synthetic: FXN 3 forward 9:69045436-69045463; SpCas9
aatacaaaaaatcgggtgcggtgg

SEQ ID NO: 44455 - DNA, 23 bp, Artificial Sequence
  Synthetic: FXN 3 forward 9:69045437-69045463; SpCas9
atacaaaaaatcgggtgcggtgg

SEQ ID NO: 44456 - DNA, 22 bp, Artificial Sequence
  Synthetic: FXN 3 forward 9:69045438-69045463; SpCas9
tacaaaaaatcgggtgcggtgg

SEQ ID NO: 44457 - DNA, 21 bp, Artificial Sequence
  Synthetic: FXN 3 forward 9:69045439-69045463; SpCas9
acaaaaaatcgggtgcggtgg

SEQ ID NO: 44458 - DNA, 20 bp, Artificial Sequence
  Synthetic: FXN 3 forward 9:69045440-69045463; SpCas9
caaaaaatcgggtgcggtgg

SEQ ID NO: 44459 - DNA, 19 bp, Artificial Sequence
  Synthetic: FXN 3 forward 9:69045441-69045463; SpCas9
aaaaaatcgggtgcggtgg

SEQ ID NO: 44460 - DNA, 18 bp, Artificial Sequence
  Synthetic: FXN 3 forward 9:69045442-69045463; SpCas9
aaaaatcgggtgcggtgg

SEQ ID NO: 44461 - DNA, 25 bp, Artificial Sequence
  Synthetic: FXN 3 forward 9:69045436-69045464; SpCas9
aatacaaaaaatcgggtgcggtggc

SEQ ID NO: 44462 - DNA, 24 bp, Artificial Sequence
  Synthetic: FXN 3 forward 9:69045437-69045464; SpCas9
atacaaaaaatcgggtgcggtggc

SEQ ID NO: 44463 - DNA, 23 bp, Artificial Sequence
  Synthetic: FXN 3 forward 9:69045438-69045464; SpCas9
tacaaaaaatcgggtgcggtggc

SEQ ID NO: 44464 - DNA, 22 bp, Artificial Sequence
  Synthetic: FXN 3 forward 9:69045439-69045464; SpCas9
acaaaaaatcgggtgcggtggc

SEQ ID NO: 44465 - DNA, 21 bp, Artificial Sequence
  Synthetic: FXN 3 forward 9:69045440-69045464; SpCas9
caaaaaatcgggtgcggtggc

SEQ ID NO: 44466 - DNA, 20 bp, Artificial Sequence
  Synthetic: FXN 3 forward 9:69045441-69045464; SpCas9
aaaaaatcgggtgcggtggc

SEQ ID NO: 44467 - DNA, 19 bp, Artificial Sequence
  Synthetic: FXN 3 forward 9:69045442-69045464; SpCas9
aaaaatcgggtgcggtggc

SEQ ID NO: 44468 - DNA, 18 bp, Artificial Sequence
  Synthetic: FXN 3 forward 9:69045443-69045464; SpCas9
aaaatcgggtgcggtggc

SEQ ID NO: 44469 - DNA, 25 bp, Artificial Sequence
  Synthetic: FXN 3 forward 9:69045451-69045479; SpCas9
gtgcggtggcgggtgcctgtaatcc

SEQ ID NO: 44470 - DNA, 24 bp, Artificial Sequence
  Synthetic: FXN 3 forward 9:69045452-69045479; SpCas9
tgcggtggcgggtgcctgtaatcc

SEQ ID NO: 44471 - DNA, 23 bp, Artificial Sequence
  Synthetic: FXN 3 forward 9:69045453-69045479; SpCas9
gcggtggcgggtgcctgtaatcc

SEQ ID NO: 44472 - DNA, 22 bp, Artificial Sequence
  Synthetic: FXN 3 forward 9:69045454-69045479; SpCas9
cggtggcgggtgcctgtaatcc

SEQ ID NO: 44473 - DNA, 21 bp, Artificial Sequence
  Synthetic: FXN 3 forward 9:69045455-69045479; SpCas9
ggtggcgggtgcctgtaatcc

SEQ ID NO: 44474 - DNA, 20 bp, Artificial Sequence
  Synthetic: FXN 3 forward 9:69045456-69045479; SpCas9
gtggcgggtgcctgtaatcc

SEQ ID NO: 44475 - DNA, 19 bp, Artificial Sequence
  Synthetic: FXN 3 forward 9:69045457-69045479; SpCas9
tggcgggtgcctgtaatcc

SEQ ID NO: 44476 - DNA, 18 bp, Artificial Sequence
  Synthetic: FXN 3 forward 9:69045458-69045479; SpCas9
ggcgggtgcctgtaatcc

SEQ ID NO: 44477 - DNA, 25 bp, Artificial Sequence
  Synthetic: FXN 3 forward 9:69045459-69045487; SpCas9
gcgggtgcctgtaatcccagctacg

SEQ ID NO: 44478 - DNA, 24 bp, Artificial Sequence
  Synthetic: FXN 3 forward 9:69045460-69045487; SpCas9
cgggtgcctgtaatcccagctacg

SEQ ID NO: 44479 - DNA, 23 bp, Artificial Sequence
  Synthetic: FXN 3 forward 9:69045461-69045487; SpCas9
gggtgcctgtaatcccagctacg

SEQ ID NO: 44480 - DNA, 22 bp, Artificial Sequence
  Synthetic: FXN 3 forward 9:69045462-69045487; SpCas9
ggtgcctgtaatcccagctacg

SEQ ID NO: 44481 - DNA, 21 bp, Artificial Sequence
  Synthetic: FXN 3 forward 9:69045463-69045487; SpCas9
gtgcctgtaatcccagctacg

SEQ ID NO: 44482 - DNA, 20 bp, Artificial Sequence
  Synthetic: FXN 3 forward 9:69045464-69045487; SpCas9
tgcctgtaatcccagctacg

SEQ ID NO: 44483 - DNA, 19 bp, Artificial Sequence
  Synthetic: FXN 3 forward 9:69045465-69045487; SpCas9
gcctgtaatcccagctacg

SEQ ID NO: 44484 - DNA, 18 bp, Artificial Sequence
  Synthetic: FXN 3 forward 9:69045466-69045487; SpCas9
cctgtaatcccagctacg

SEQ ID NO: 44485 - DNA, 25 bp, Artificial Sequence
  Synthetic: FXN 3 forward 9:69045460-69045488; SpCas9
cgggtgcctgtaatcccagctacgc

SEQ ID NO: 44486 - DNA, 24 bp, Artificial Sequence
  Synthetic: FXN 3 forward 9:69045461-69045488; SpCas9
gggtgcctgtaatcccagctacgc

SEQ ID NO: 44487 - DNA, 23 bp, Artificial Sequence
  Synthetic: FXN 3 forward 9:69045462-69045488; SpCas9
ggtgcctgtaatcccagctacgc

SEQ ID NO: 44488 - DNA, 22 bp, Artificial Sequence
  Synthetic: FXN 3 forward 9:69045463-69045488; SpCas9
gtgcctgtaatcccagctacgc

SEQ ID NO: 44489 - DNA, 21 bp, Artificial Sequence
  Synthetic: FXN 3 forward 9:69045464-69045488; SpCas9
tgcctgtaatcccagctacgc

SEQ ID NO: 44490 - DNA, 20 bp, Artificial Sequence
  Synthetic: FXN 3 forward 9:69045465-69045488; SpCas9
gcctgtaatcccagctacgc

SEQ ID NO: 44491 - DNA, 19 bp, Artificial Sequence
  Synthetic: FXN 3 forward 9:69045466-69045488; SpCas9
cctgtaatcccagctacgc

SEQ ID NO: 44492 - DNA, 18 bp, Artificial Sequence
  Synthetic: FXN 3 forward 9:69045467-69045488; SpCas9
ctgtaatcccagctacgc

SEQ ID NO: 44493 - DNA, 25 bp, Artificial Sequence
  Synthetic: FXN 3 forward 9:69045462-69045490; SpCas9
ggtgcctgtaatcccagctacgcgg

SEQ ID NO: 44494 - DNA, 24 bp, Artificial Sequence
  Synthetic: FXN 3 forward 9:69045463-69045490; SpCas9
gtgcctgtaatcccagctacgcgg

SEQ ID NO: 44495 - DNA, 23 bp, Artificial Sequence
  Synthetic: FXN 3 forward 9:69045464-69045490; SpCas9
tgcctgtaatcccagctacgcgg

SEQ ID NO: 44496 - DNA, 22 bp, Artificial Sequence
  Synthetic: FXN 3 forward 9:69045465-69045490; SpCas9
gcctgtaatcccagctacgcgg

SEQ ID NO: 44497 - DNA, 21 bp, Artificial Sequence
  Synthetic: FXN 3 forward 9:69045466-69045490; SpCas9
cctgtaatcccagctacgcgg

SEQ ID NO: 44498 - DNA, 20 bp, Artificial Sequence
  Synthetic: FXN 3 forward 9:69045467-69045490; SpCas9
ctgtaatcccagctacgcgg

SEQ ID NO: 44499 - DNA, 19 bp, Artificial Sequence
  Synthetic: FXN 3 forward 9:69045468-69045490; SpCas9
tgtaatcccagctacgcgg

SEQ ID NO: 44500 - DNA, 18 bp, Artificial Sequence
  Synthetic: FXN 3 forward 9:69045469-69045490; SpCas9
gtaatcccagctacgcgg

SEQ ID NO: 44501 - DNA, 25 bp, Artificial Sequence
  Synthetic: FXN 3 forward 9:69045463-69045491; SpCas9
gtgcctgtaatcccagctacgcggg

SEQ ID NO: 44502 - DNA, 24 bp, Artificial Sequence
  Synthetic: FXN 3 forward 9:69045464-69045491; SpCas9
tgcctgtaatcccagctacgcggg

SEQ ID NO: 44503 - DNA, 23 bp, Artificial Sequence
  Synthetic: FXN 3 forward 9:69045465-69045491; SpCas9
gcctgtaatcccagctacgcggg

SEQ ID NO: 44504 - DNA, 22 bp, Artificial Sequence
  Synthetic: FXN 3 forward 9:69045466-69045491; SpCas9
cctgtaatcccagctacgcggg

SEQ ID NO: 44505 - DNA, 21 bp, Artificial Sequence
  Synthetic: FXN 3 forward 9:69045467-69045491; SpCas9
ctgtaatcccagctacgcggg

SEQ ID NO: 44506 - DNA, 20 bp, Artificial Sequence
  Synthetic: FXN 3 forward 9:69045468-69045491; SpCas9
tgtaatcccagctacgcggg

SEQ ID NO: 44507 - DNA, 19 bp, Artificial Sequence
  Synthetic: FXN 3 forward 9:69045469-69045491; SpCas9
gtaatcccagctacgcggg

SEQ ID NO: 44508 - DNA, 18 bp, Artificial Sequence
  Synthetic: FXN 3 forward 9:69045470-69045491; SpCas9
taatcccagctacgcggg

SEQ ID NO: 44509 - DNA, 25 bp, Artificial Sequence
  Synthetic: FXN 3 reverse 9:69045466-69045494; SpCas9
cagcctcccgcgtagctgggattac

SEQ ID NO: 44510 - DNA, 24 bp, Artificial Sequence
  Synthetic: FXN 3 reverse 9:69045467-69045494; SpCas9
agcctcccgcgtagctgggattac

SEQ ID NO: 44511 - DNA, 23 bp, Artificial Sequence
  Synthetic: FXN 3 reverse 9:69045468-69045494; SpCas9
gcctcccgcgtagctgggattac

SEQ ID NO: 44512 - DNA, 22 bp, Artificial Sequence
  Synthetic: FXN 3 reverse 9:69045469-69045494; SpCas9
cctcccgcgtagctgggattac

SEQ ID NO: 44513 - DNA, 21 bp, Artificial Sequence
  Synthetic: FXN 3 reverse 9:69045470-69045494; SpCas9
ctcccgcgtagctgggattac

SEQ ID NO: 44514 - DNA, 20 bp, Artificial Sequence
  Synthetic: FXN 3 reverse 9:69045471-69045494; SpCas9
tcccgcgtagctgggattac

SEQ ID NO: 44515 - DNA, 19 bp, Artificial Sequence
  Synthetic: FXN 3 reverse 9:69045472-69045494; SpCas9
cccgcgtagctgggattac

SEQ ID NO: 44516 - DNA, 18 bp, Artificial Sequence
  Synthetic: FXN 3 reverse 9:69045473-69045494; SpCas9
ccgcgtagctgggattac

SEQ ID NO: 44517 - DNA, 25 bp, Artificial Sequence
  Synthetic: FXN 3 reverse 9:69045467-69045495; SpCas9
tcagcctcccgcgtagctgggatta

SEQ ID NO: 44518 - DNA, 24 bp, Artificial Sequence
  Synthetic: FXN 3 reverse 9:69045468-69045495; SpCas9
cagcctcccgcgtagctgggatta

SEQ ID NO: 44519 - DNA, 23 bp, Artificial Sequence
  Synthetic: FXN 3 reverse 9:69045469-69045495; SpCas9
agcctcccgcgtagctgggatta

SEQ ID NO: 44520 - DNA, 22 bp, Artificial Sequence
  Synthetic: FXN 3 reverse 9:69045470-69045495; SpCas9
gcctcccgcgtagctgggatta

SEQ ID NO: 44521 - DNA, 21 bp, Artificial Sequence
  Synthetic: FXN 3 reverse 9:69045471-69045495; SpCas9
cctcccgcgtagctgggatta

SEQ ID NO: 44522 - DNA, 20 bp, Artificial Sequence
  Synthetic: FXN 3 reverse 9:69045472-69045495; SpCas9
ctcccgcgtagctgggatta

SEQ ID NO: 44523 - DNA, 19 bp, Artificial Sequence
  Synthetic: FXN 3 reverse 9:69045473-69045495; SpCas9
tcccgcgtagctgggatta

SEQ ID NO: 44524 - DNA, 18 bp, Artificial Sequence
  Synthetic: FXN 3 reverse 9:69045474-69045495; SpCas9
cccgcgtagctgggatta

SEQ ID NO: 44525 - DNA, 25 bp, Artificial Sequence
  Synthetic: FXN 3 forward 9:69045468-69045496; SpCas9
tgtaatcccagctacgcgggaggct

SEQ ID NO: 44526 - DNA, 24 bp, Artificial Sequence
  Synthetic: FXN 3 forward 9:69045469-69045496; SpCas9
gtaatcccagctacgcgggaggct

SEQ ID NO: 44527 - DNA, 23 bp, Artificial Sequence
  Synthetic: FXN 3 forward 9:69045470-69045496; SpCas9
taatcccagctacgcgggaggct

SEQ ID NO: 44528 - DNA, 22 bp, Artificial Sequence
  Synthetic: FXN 3 forward 9:69045471-69045496; SpCas9
aatcccagctacgcgggaggct

SEQ ID NO: 44529 - DNA, 21 bp, Artificial Sequence
  Synthetic: FXN 3 forward 9:69045472-69045496; SpCas9
atcccagctacgcgggaggct

SEQ ID NO: 44530 - DNA, 20 bp, Artificial Sequence
  Synthetic: FXN 3 forward 9:69045473-69045496; SpCas9
tcccagctacgcgggaggct

SEQ ID NO: 44531 - DNA, 19 bp, Artificial Sequence
  Synthetic: FXN 3 forward 9:69045474-69045496; SpCas9
cccagctacgcgggaggct

SEQ ID NO: 44532 - DNA, 18 bp, Artificial Sequence
  Synthetic: FXN 3 forward 9:69045475-69045496; SpCas9
ccagctacgcgggaggct

SEQ ID NO: 44533 - DNA, 25 bp, Artificial Sequence
  Synthetic: FXN 3 forward 9:69045469-69045497; SpCas9
gtaatcccagctacgcgggaggctg

SEQ ID NO: 44534 - DNA, 24 bp, Artificial Sequence
  Synthetic: FXN 3 forward 9:69045470-69045497; SpCas9
taatcccagctacgcgggaggctg

SEQ ID NO: 44535 - DNA, 23 bp, Artificial Sequence
  Synthetic: FXN 3 forward 9:69045471-69045497; SpCas9
aatcccagctacgcgggaggctg

SEQ ID NO: 44536 - DNA, 22 bp, Artificial Sequence
  Synthetic: FXN 3 forward 9:69045472-69045497; SpCas9
atcccagctacgcgggaggctg

SEQ ID NO: 44537 - DNA, 21 bp, Artificial Sequence
  Synthetic: FXN 3 forward 9:69045473-69045497; SpCas9
tcccagctacgcgggaggctg

SEQ ID NO: 44538 - DNA, 20 bp, Artificial Sequence
  Synthetic: FXN 3 forward 9:69045474-69045497; SpCas9
cccagctacgcgggaggctg

SEQ ID NO: 44539 - DNA, 19 bp, Artificial Sequence
  Synthetic: FXN 3 forward 9:69045475-69045497; SpCas9
ccagctacgcgggaggctg

SEQ ID NO: 44540 - DNA, 18 bp, Artificial Sequence
  Synthetic: FXN 3 forward 9:69045476-69045497; SpCas9
cagctacgcgggaggctg

SEQ ID NO: 44541 - DNA, 25 bp, Artificial Sequence
  Synthetic: FXN 3 reverse 9:69045474-69045502; SpCas9
tcgtgcctcagcctcccgcgtagct

SEQ ID NO: 44542 - DNA, 24 bp, Artificial Sequence
  Synthetic: FXN 3 reverse 9:69045475-69045502; SpCas9
cgtgcctcagcctcccgcgtagct

SEQ ID NO: 44543 - DNA, 23 bp, Artificial Sequence
  Synthetic: FXN 3 reverse 9:69045476-69045502; SpCas9
gtgcctcagcctcccgcgtagct

SEQ ID NO: 44544 - DNA, 22 bp, Artificial Sequence
  Synthetic: FXN 3 reverse 9:69045477-69045502; SpCas9
tgcctcagcctcccgcgtagct

SEQ ID NO: 44545 - DNA, 21 bp, Artificial Sequence
  Synthetic: FXN 3 reverse 9:69045478-69045502; SpCas9
gcctcagcctcccgcgtagct

SEQ ID NO: 44546 - DNA, 20 bp, Artificial Sequence
  Synthetic: FXN 3 reverse 9:69045479-69045502; SpCas9
cctcagcctcccgcgtagct

SEQ ID NO: 44547 - DNA, 19 bp, Artificial Sequence
  Synthetic: FXN 3 reverse 9:69045480-69045502; SpCas9
ctcagcctcccgcgtagct

SEQ ID NO: 44548 - DNA, 18 bp, Artificial Sequence
  Synthetic: FXN 3 reverse 9:69045481-69045502; SpCas9
tcagcctcccgcgtagct

SEQ ID NO: 44549 - DNA, 25 bp, Artificial Sequence
  Synthetic: FXN 3 forward 9:69045475-69045503; SpCas9
ccagctacgcgggaggctgaggcac

SEQ ID NO: 44550 - DNA, 24 bp, Artificial Sequence
  Synthetic: FXN 3 forward 9:69045476-69045503; SpCas9
cagctacgcgggaggctgaggcac

SEQ ID NO: 44551 - DNA, 23 bp, Artificial Sequence
  Synthetic: FXN 3 forward 9:69045477-69045503; SpCas9
agctacgcgggaggctgaggcac

SEQ ID NO: 44552 - DNA, 22 bp, Artificial Sequence
  Synthetic: FXN 3 forward 9:69045478-69045503; SpCas9
gctacgcgggaggctgaggcac

SEQ ID NO: 44553 - DNA, 21 bp, Artificial Sequence
  Synthetic: FXN 3 forward 9:69045479-69045503; SpCas9
ctacgcgggaggctgaggcac

SEQ ID NO: 44554 - DNA, 20 bp, Artificial Sequence
  Synthetic: FXN 3 forward 9:69045480-69045503; SpCas9
tacgcgggaggctgaggcac

SEQ ID NO: 44555 - DNA, 19 bp, Artificial Sequence
  Synthetic: FXN 3 forward 9:69045481-69045503; SpCas9
acgcgggaggctgaggcac

SEQ ID NO: 44556 - DNA, 18 bp, Artificial Sequence
  Synthetic: FXN 3 forward 9:69045482-69045503; SpCas9
cgcgggaggctgaggcac

SEQ ID NO: 44557 - DNA, 25 bp, Artificial Sequence
  Synthetic: FXN 3 reverse 9:69045475-69045503; SpCas9
ctcgtgcctcagcctcccgcgtagc

SEQ ID NO: 44558 - DNA, 24 bp, Artificial Sequence
  Synthetic: FXN 3 reverse 9:69045476-69045503; SpCas9
tcgtgcctcagcctcccgcgtagc

SEQ ID NO: 44559 - DNA, 23 bp, Artificial Sequence
  Synthetic: FXN 3 reverse 9:69045477-69045503; SpCas9
cgtgcctcagcctcccgcgtagc

SEQ ID NO: 44560 - DNA, 22 bp, Artificial Sequence
  Synthetic: FXN 3 reverse 9:69045478-69045503; SpCas9
gtgcctcagcctcccgcgtagc

SEQ ID NO: 44561 - DNA, 21 bp, Artificial Sequence
  Synthetic: FXN 3 reverse 9:69045479-69045503; SpCas9
tgcctcagcctcccgcgtagc

SEQ ID NO: 44562 - DNA, 20 bp, Artificial Sequence
  Synthetic: FXN 3 reverse 9:69045480-69045503; SpCas9
gcctcagcctcccgcgtagc

SEQ ID NO: 44563 - DNA, 19 bp, Artificial Sequence
  Synthetic: FXN 3 reverse 9:69045481-69045503; SpCas9
cctcagcctcccgcgtagc

SEQ ID NO: 44564 - DNA, 18 bp, Artificial Sequence
  Synthetic: FXN 3 reverse 9:69045482-69045503; SpCas9
ctcagcctcccgcgtagc

SEQ ID NO: 44565 - DNA, 25 bp, Artificial Sequence
  Synthetic: FXN 3 reverse 9:69045479-69045507; SpCas9
gattctcgtgcctcagcctcccgcg

SEQ ID NO: 44566 - DNA, 24 bp, Artificial Sequence
  Synthetic: FXN 3 reverse 9:69045480-69045507; SpCas9
attctcgtgcctcagcctcccgcg

SEQ ID NO: 44567 - DNA, 23 bp, Artificial Sequence
  Synthetic: FXN 3 reverse 9:69045481-69045507; SpCas9
ttctcgtgcctcagcctcccgcg

SEQ ID NO: 44568 - DNA, 22 bp, Artificial Sequence
  Synthetic: FXN 3 reverse 9:69045482-69045507; SpCas9
tctcgtgcctcagcctcccgcg

SEQ ID NO: 44569 - DNA, 21 bp, Artificial Sequence
  Synthetic: FXN 3 reverse 9:69045483-69045507; SpCas9
ctcgtgcctcagcctcccgcg

SEQ ID NO: 44570 - DNA, 20 bp, Artificial Sequence
  Synthetic: FXN 3 reverse 9:69045484-69045507; SpCas9
tcgtgcctcagcctcccgcg

SEQ ID NO: 44571 - DNA, 19 bp, Artificial Sequence
  Synthetic: FXN 3 reverse 9:69045485-69045507; SpCas9
cgtgcctcagcctcccgcg

SEQ ID NO: 44572 - DNA, 18 bp, Artificial Sequence
  Synthetic: FXN 3 reverse 9:69045486-69045507; SpCas9
gtgcctcagcctcccgcg

SEQ ID NO: 44573 - DNA, 25 bp, Artificial Sequence
  Synthetic: FXN 3 forward 9:69045491-69045519; SpCas9
ctgaggcacgagaatcactcgaacc

SEQ ID NO: 44574 - DNA, 24 bp, Artificial Sequence
  Synthetic: FXN 3 forward 9:69045492-69045519; SpCas9
tgaggcacgagaatcactcgaacc

SEQ ID NO: 44575 - DNA, 23 bp, Artificial Sequence
  Synthetic: FXN 3 forward 9:69045493-69045519; SpCas9
gaggcacgagaatcactcgaacc

SEQ ID NO: 44576 - DNA, 22 bp, Artificial Sequence
  Synthetic: FXN 3 forward 9:69045494-69045519; SpCas9
aggcacgagaatcactcgaacc

SEQ ID NO: 44577 - DNA, 21 bp, Artificial Sequence
  Synthetic: FXN 3 forward 9:69045495-69045519; SpCas9
ggcacgagaatcactcgaacc

SEQ ID NO: 44578 - DNA, 20 bp, Artificial Sequence
  Synthetic: FXN 3 forward 9:69045496-69045519; SpCas9
gcacgagaatcactcgaacc

SEQ ID NO: 44579 - DNA, 19 bp, Artificial Sequence
  Synthetic: FXN 3 forward 9:69045497-69045519; SpCas9
cacgagaatcactcgaacc

SEQ ID NO: 44580 - DNA, 18 bp, Artificial Sequence
  Synthetic: FXN 3 forward 9:69045498-69045519; SpCas9
acgagaatcactcgaacc

SEQ ID NO: 44581 - DNA, 25 bp, Artificial Sequence
  Synthetic: FXN 3 reverse 9:69045491-69045519; SpCas9
ccgggttcgagtgattctcgtgcct

SEQ ID NO: 44582 - DNA, 24 bp, Artificial Sequence
  Synthetic: FXN 3 reverse 9:69045492-69045519; SpCas9
cgggttcgagtgattctcgtgcct

SEQ ID NO: 44583 - DNA, 23 bp, Artificial Sequence
  Synthetic: FXN 3 reverse 9:69045493-69045519; SpCas9
gggttcgagtgattctcgtgcct

SEQ ID NO: 44584 - DNA, 22 bp, Artificial Sequence
  Synthetic: FXN 3 reverse 9:69045494-69045519; SpCas9
ggttcgagtgattctcgtgcct

SEQ ID NO: 44585 - DNA, 21 bp, Artificial Sequence
  Synthetic: FXN 3 reverse 9:69045495-69045519; SpCas9
gttcgagtgattctcgtgcct

SEQ ID NO: 44586 - DNA, 20 bp, Artificial Sequence
  Synthetic: FXN 3 reverse 9:69045496-69045519; SpCas9
ttcgagtgattctcgtgcct

SEQ ID NO: 44587 - DNA, 19 bp, Artificial Sequence
  Synthetic: FXN 3 reverse 9:69045497-69045519; SpCas9
tcgagtgattctcgtgcct

SEQ ID NO: 44588 - DNA, 18 bp, Artificial Sequence
  Synthetic: FXN 3 reverse 9:69045498-69045519; SpCas9
cgagtgattctcgtgcct

SEQ ID NO: 44589 - DNA, 25 bp, Artificial Sequence
  Synthetic: FXN 3 forward 9:69045492-69045520; SpCas9
tgaggcacgagaatcactcgaaccc

SEQ ID NO: 44590 - DNA, 24 bp, Artificial Sequence
  Synthetic: FXN 3 forward 9:69045493-69045520; SpCas9
gaggcacgagaatcactcgaaccc

SEQ ID NO: 44591 - DNA, 23 bp, Artificial Sequence
  Synthetic: FXN 3 forward 9:69045494-69045520; SpCas9
aggcacgagaatcactcgaaccc

SEQ ID NO: 44592 - DNA, 22 bp, Artificial Sequence
  Synthetic: FXN 3 forward 9:69045495-69045520; SpCas9
ggcacgagaatcactcgaaccc

SEQ ID NO: 44593 - DNA, 21 bp, Artificial Sequence
  Synthetic: FXN 3 forward 9:69045496-69045520; SpCas9
gcacgagaatcactcgaaccc

SEQ ID NO: 44594 - DNA, 20 bp, Artificial Sequence
  Synthetic: FXN 3 forward 9:69045497-69045520; SpCas9
cacgagaatcactcgaaccc

SEQ ID NO: 44595 - DNA, 19 bp, Artificial Sequence
  Synthetic: FXN 3 forward 9:69045498-69045520; SpCas9
acgagaatcactcgaaccc

SEQ ID NO: 44596 - DNA, 18 bp, Artificial Sequence
  Synthetic: FXN 3 forward 9:69045499-69045520; SpCas9
cgagaatcactcgaaccc

SEQ ID NO: 44597 - DNA, 25 bp, Artificial Sequence
  Synthetic: FXN 3 forward 9:69045494-69045522; SpCas9
aggcacgagaatcactcgaacccgg

SEQ ID NO: 44598 - DNA, 24 bp, Artificial Sequence
  Synthetic: FXN 3 forward 9:69045495-69045522; SpCas9
ggcacgagaatcactcgaacccgg

SEQ ID NO: 44599 - DNA, 23 bp, Artificial Sequence
  Synthetic: FXN 3 forward 9:69045496-69045522; SpCas9
gcacgagaatcactcgaacccgg

SEQ ID NO: 44600 - DNA, 22 bp, Artificial Sequence
  Synthetic: FXN 3 forward 9:69045497-69045522; SpCas9
cacgagaatcactcgaacccgg

SEQ ID NO: 44601 - DNA, 21 bp, Artificial Sequence
  Synthetic: FXN 3 forward 9:69045498-69045522; SpCas9
acgagaatcactcgaacccgg

SEQ ID NO: 44602 - DNA, 20 bp, Artificial Sequence
  Synthetic: FXN 3 forward 9:69045499-69045522; SpCas9
cgagaatcactcgaacccgg

SEQ ID NO: 44603 - DNA, 19 bp, Artificial Sequence
  Synthetic: FXN 3 forward 9:69045500-69045522; SpCas9
gagaatcactcgaacccgg

SEQ ID NO: 44604 - DNA, 18 bp, Artificial Sequence
  Synthetic: FXN 3 forward 9:69045501-69045522; SpCas9
agaatcactcgaacccgg

SEQ ID NO: 44605 - DNA, 25 bp, Artificial Sequence
  Synthetic: FXN 3 forward 9:69045495-69045523; SpCas9
ggcacgagaatcactcgaacccggg

SEQ ID NO: 44606 - DNA, 24 bp, Artificial Sequence
  Synthetic: FXN 3 forward 9:69045496-69045523; SpCas9
gcacgagaatcactcgaacccggg

SEQ ID NO: 44607 - DNA, 23 bp, Artificial Sequence
  Synthetic: FXN 3 forward 9:69045497-69045523; SpCas9
cacgagaatcactcgaacccggg

SEQ ID NO: 44608 - DNA, 22 bp, Artificial Sequence
  Synthetic: FXN 3 forward 9:69045498-69045523; SpCas9
acgagaatcactcgaacccggg

SEQ ID NO: 44609 - DNA, 21 bp, Artificial Sequence
  Synthetic: FXN 3 forward 9:69045499-69045523; SpCas9
cgagaatcactcgaacccggg

SEQ ID NO: 44610 - DNA, 20 bp, Artificial Sequence
  Synthetic: FXN 3 forward 9:69045500-69045523; SpCas9
gagaatcactcgaacccggg

SEQ ID NO: 44611 - DNA, 19 bp, Artificial Sequence
  Synthetic: FXN 3 forward 9:69045501-69045523; SpCas9
agaatcactcgaacccggg

SEQ ID NO: 44612 - DNA, 18 bp, Artificial Sequence
  Synthetic: FXN 3 forward 9:69045502-69045523; SpCas9
gaatcactcgaacccggg

SEQ ID NO: 44613 - DNA, 25 bp, Artificial Sequence
  Synthetic: FXN 3 forward 9:69045498-69045526; SpCas9
acgagaatcactcgaacccgggagg

SEQ ID NO: 44614 - DNA, 24 bp, Artificial Sequence
  Synthetic: FXN 3 forward 9:69045499-69045526; SpCas9
cgagaatcactcgaacccgggagg

SEQ ID NO: 44615 - DNA, 23 bp, Artificial Sequence
  Synthetic: FXN 3 forward 9:69045500-69045526; SpCas9
gagaatcactcgaacccgggagg

SEQ ID NO: 44616 - DNA, 22 bp, Artificial Sequence
  Synthetic: FXN 3 forward 9:69045501-69045526; SpCas9
agaatcactcgaacccgggagg

SEQ ID NO: 44617 - DNA, 21 bp, Artificial Sequence
  Synthetic: FXN 3 forward 9:69045502-69045526; SpCas9
gaatcactcgaacccgggagg

SEQ ID NO: 44618 - DNA, 20 bp, Artificial Sequence
  Synthetic: FXN 3 forward 9:69045503-69045526; SpCas9
aatcactcgaacccgggagg

SEQ ID NO: 44619 - DNA, 19 bp, Artificial Sequence
  Synthetic: FXN 3 forward 9:69045504-69045526; SpCas9
atcactcgaacccgggagg

SEQ ID NO: 44620 - DNA, 18 bp, Artificial Sequence
  Synthetic: FXN 3 forward 9:69045505-69045526; SpCas9
tcactcgaacccgggagg

SEQ ID NO: 44621 - DNA, 25 bp, Artificial Sequence
  Synthetic: FXN 3 forward 9:69045499-69045527; SpCas9
cgagaatcactcgaacccgggaggc

SEQ ID NO: 44622 - DNA, 24 bp, Artificial Sequence
  Synthetic: FXN 3 forward 9:69045500-69045527; SpCas9
gagaatcactcgaacccgggaggc

SEQ ID NO: 44623 - DNA, 23 bp, Artificial Sequence
  Synthetic: FXN 3 forward 9:69045501-69045527; SpCas9
agaatcactcgaacccgggaggc

SEQ ID NO: 44624 - DNA, 22 bp, Artificial Sequence
  Synthetic: FXN 3 forward 9:69045502-69045527; SpCas9
gaatcactcgaacccgggaggc

SEQ ID NO: 44625 - DNA, 21 bp, Artificial Sequence
  Synthetic: FXN 3 forward 9:69045503-69045527; SpCas9
aatcactcgaacccgggaggc

SEQ ID NO: 44626 - DNA, 20 bp, Artificial Sequence
  Synthetic: FXN 3 forward 9:69045504-69045527; SpCas9
atcactcgaacccgggaggc

SEQ ID NO: 44627 - DNA, 19 bp, Artificial Sequence
  Synthetic: FXN 3 forward 9:69045505-69045527; SpCas9
tcactcgaacccgggaggc

SEQ ID NO: 44628 - DNA, 18 bp, Artificial Sequence
  Synthetic: FXN 3 forward 9:69045506-69045527; SpCas9
cactcgaacccgggaggc

SEQ ID NO: 44629 - DNA, 25 bp, Artificial Sequence
  Synthetic: FXN 3 forward 9:69045500-69045528; SpCas9
gagaatcactcgaacccgggaggcg

SEQ ID NO: 44630 - DNA, 24 bp, Artificial Sequence
  Synthetic: FXN 3 forward 9:69045501-69045528; SpCas9
agaatcactcgaacccgggaggcg

SEQ ID NO: 44631 - DNA, 23 bp, Artificial Sequence
  Synthetic: FXN 3 forward 9:69045502-69045528; SpCas9
gaatcactcgaacccgggaggcg

SEQ ID NO: 44632 - DNA, 22 bp, Artificial Sequence
  Synthetic: FXN 3 forward 9:69045503-69045528; SpCas9
aatcactcgaacccgggaggcg

SEQ ID NO: 44633 - DNA, 21 bp, Artificial Sequence
  Synthetic: FXN 3 forward 9:69045504-69045528; SpCas9
atcactcgaacccgggaggcg

SEQ ID NO: 44634 - DNA, 20 bp, Artificial Sequence
  Synthetic: FXN 3 forward 9:69045505-69045528; SpCas9
tcactcgaacccgggaggcg

SEQ ID NO: 44635 - DNA, 19 bp, Artificial Sequence
  Synthetic: FXN 3 forward 9:69045506-69045528; SpCas9
cactcgaacccgggaggcg

SEQ ID NO: 44636 - DNA, 18 bp, Artificial Sequence
  Synthetic: FXN 3 forward 9:69045507-69045528; SpCas9
actcgaacccgggaggcg

SEQ ID NO: 44637 - DNA, 25 bp, Artificial Sequence
  Synthetic: FXN 3 forward 9:69045501-69045529; SpCas9
agaatcactcgaacccgggaggcgg

SEQ ID NO: 44638 - DNA, 24 bp, Artificial Sequence
  Synthetic: FXN 3 forward 9:69045502-69045529; SpCas9
gaatcactcgaacccgggaggcgg

SEQ ID NO: 44639 - DNA, 23 bp, Artificial Sequence
  Synthetic: FXN 3 forward 9:69045503-69045529; SpCas9
aatcactcgaacccgggaggcgg

SEQ ID NO: 44640 - DNA, 22 bp, Artificial Sequence
  Synthetic: FXN 3 forward 9:69045504-69045529; SpCas9
atcactcgaacccgggaggcgg

SEQ ID NO: 44641 - DNA, 21 bp, Artificial Sequence
  Synthetic: FXN 3 forward 9:69045505-69045529; SpCas9
tcactcgaacccgggaggcgg

SEQ ID NO: 44642 - DNA, 20 bp, Artificial Sequence
  Synthetic: FXN 3 forward 9:69045506-69045529; SpCas9
cactcgaacccgggaggcgg

SEQ ID NO: 44643 - DNA, 19 bp, Artificial Sequence
  Synthetic: FXN 3 forward 9:69045507-69045529; SpCas9
actcgaacccgggaggcgg

SEQ ID NO: 44644 - DNA, 18 bp, Artificial Sequence
  Synthetic: FXN 3 forward 9:69045508-69045529; SpCas9
ctcgaacccgggaggcgg

SEQ ID NO: 44645 - DNA, 25 bp, Artificial Sequence
  Synthetic: FXN 3 forward 9:69045507-69045535; SpCas9
actcgaacccgggaggcgggggttg

SEQ ID NO: 44646 - DNA, 24 bp, Artificial Sequence
  Synthetic: FXN 3 forward 9:69045508-69045535; SpCas9
ctcgaacccgggaggcgggggttg

SEQ ID NO: 44647 - DNA, 23 bp, Artificial Sequence
  Synthetic: FXN 3 forward 9:69045509-69045535; SpCas9
tcgaacccgggaggcgggggttg

SEQ ID NO: 44648 - DNA, 22 bp, Artificial Sequence
  Synthetic: FXN 3 forward 9:69045510-69045535; SpCas9
cgaacccgggaggcgggggttg

SEQ ID NO: 44649 - DNA, 21 bp, Artificial Sequence
  Synthetic: FXN 3 forward 9:69045511-69045535; SpCas9
gaacccgggaggcgggggttg

SEQ ID NO: 44650 - DNA, 20 bp, Artificial Sequence
  Synthetic: FXN 3 forward 9:69045512-69045535; SpCas9
aacccgggaggcgggggttg

SEQ ID NO: 44651 - DNA, 19 bp, Artificial Sequence
  Synthetic: FXN 3 forward 9:69045513-69045535; SpCas9
acccgggaggcgggggttg

SEQ ID NO: 44652 - DNA, 18 bp, Artificial Sequence
  Synthetic: FXN 3 forward 9:69045514-69045535; SpCas9
cccgggaggcgggggttg

SEQ ID NO: 44653 - DNA, 25 bp, Artificial Sequence
  Synthetic: FXN 3 reverse 9:69045508-69045536; SpCas9
actgcaacccccgcctcccgggttc

SEQ ID NO: 44654 - DNA, 24 bp, Artificial Sequence
  Synthetic: FXN 3 reverse 9:69045509-69045536; SpCas9
ctgcaacccccgcctcccgggttc

SEQ ID NO: 44655 - DNA, 23 bp, Artificial Sequence
  Synthetic: FXN 3 reverse 9:69045510-69045536; SpCas9
tgcaacccccgcctcccgggttc

SEQ ID NO: 44656 - DNA, 22 bp, Artificial Sequence
  Synthetic: FXN 3 reverse 9:69045511-69045536; SpCas9
gcaacccccgcctcccgggttc

SEQ ID NO: 44657 - DNA, 21 bp, Artificial Sequence
  Synthetic: FXN 3 reverse 9:69045512-69045536; SpCas9
caacccccgcctcccgggttc

SEQ ID NO: 44658 - DNA, 20 bp, Artificial Sequence
  Synthetic: FXN 3 reverse 9:69045513-69045536; SpCas9
aacccccgcctcccgggttc

SEQ ID NO: 44659 - DNA, 19 bp, Artificial Sequence
  Synthetic: FXN 3 reverse 9:69045514-69045536; SpCas9
acccccgcctcccgggttc

SEQ ID NO: 44660 - DNA, 18 bp, Artificial Sequence
  Synthetic: FXN 3 reverse 9:69045515-69045536; SpCas9
cccccgcctcccgggttc

SEQ ID NO: 44661 - DNA, 25 bp, Artificial Sequence
  Synthetic: FXN 3 forward 9:69045511-69045539; SpCas9
gaacccgggaggcgggggttgcagt

SEQ ID NO: 44662 - DNA, 24 bp, Artificial Sequence
  Synthetic: FXN 3 forward 9:69045512-69045539; SpCas9
aacccgggaggcgggggttgcagt

SEQ ID NO: 44663 - DNA, 23 bp, Artificial Sequence
  Synthetic: FXN 3 forward 9:69045513-69045539; SpCas9
acccgggaggcgggggttgcagt

SEQ ID NO: 44664 - DNA, 22 bp, Artificial Sequence
  Synthetic: FXN 3 forward 9:69045514-69045539; SpCas9
cccgggaggcgggggttgcagt

SEQ ID NO: 44665 - DNA, 21 bp, Artificial Sequence
  Synthetic: FXN 3 forward 9:69045515-69045539; SpCas9
ccgggaggcgggggttgcagt

SEQ ID NO: 44666 - DNA, 20 bp, Artificial Sequence
  Synthetic: FXN 3 forward 9:69045516-69045539; SpCas9
cgggaggcgggggttgcagt

SEQ ID NO: 44667 - DNA, 19 bp, Artificial Sequence
  Synthetic: FXN 3 forward 9:69045517-69045539; SpCas9
gggaggcgggggttgcagt

SEQ ID NO: 44668 - DNA, 18 bp, Artificial Sequence
  Synthetic: FXN 3 forward 9:69045518-69045539; SpCas9
ggaggcgggggttgcagt

SEQ ID NO: 44669 - DNA, 25 bp, Artificial Sequence
  Synthetic: FXN 3 reverse 9:69045514-69045542; SpCas9
cggctcactgcaacccccgcctccc

SEQ ID NO: 44670 - DNA, 24 bp, Artificial Sequence
  Synthetic: FXN 3 reverse 9:69045515-69045542; SpCas9
ggctcactgcaacccccgcctccc

SEQ ID NO: 44671 - DNA, 23 bp, Artificial Sequence
  Synthetic: FXN 3 reverse 9:69045516-69045542; SpCas9
gctcactgcaacccccgcctccc

SEQ ID NO: 44672 - DNA, 22 bp, Artificial Sequence
  Synthetic: FXN 3 reverse 9:69045517-69045542; SpCas9
ctcactgcaacccccgcctccc

SEQ ID NO: 44673 - DNA, 21 bp, Artificial Sequence
  Synthetic: FXN 3 reverse 9:69045518-69045542; SpCas9
tcactgcaacccccgcctccc

SEQ ID NO: 44674 - DNA, 20 bp, Artificial Sequence
  Synthetic: FXN 3 reverse 9:69045519-69045542; SpCas9
cactgcaacccccgcctccc

SEQ ID NO: 44675 - DNA, 19 bp, Artificial Sequence
  Synthetic: FXN 3 reverse 9:69045520-69045542; SpCas9
actgcaacccccgcctccc

SEQ ID NO: 44676 - DNA, 18 bp, Artificial Sequence
  Synthetic: FXN 3 reverse 9:69045521-69045542; SpCas9
ctgcaacccccgcctccc

SEQ ID NO: 44677 - DNA, 25 bp, Artificial Sequence
  Synthetic: FXN 3 reverse 9:69045515-69045543; SpCas9
tcggctcactgcaacccccgcctcc

SEQ ID NO: 44678 - DNA, 24 bp, Artificial Sequence
  Synthetic: FXN 3 reverse 9:69045516-69045543; SpCas9
cggctcactgcaacccccgcctcc

SEQ ID NO: 44679 - DNA, 23 bp, Artificial Sequence
  Synthetic: FXN 3 reverse 9:69045517-69045543; SpCas9
ggctcactgcaacccccgcctcc

SEQ ID NO: 44680 - DNA, 22 bp, Artificial Sequence
  Synthetic: FXN 3 reverse 9:69045518-69045543; SpCas9
gctcactgcaacccccgcctcc

SEQ ID NO: 44681 - DNA, 21 bp, Artificial Sequence
  Synthetic: FXN 3 reverse 9:69045519-69045543; SpCas9
ctcactgcaacccccgcctcc

SEQ ID NO: 44682 - DNA, 20 bp, Artificial Sequence
  Synthetic: FXN 3 reverse 9:69045520-69045543; SpCas9
tcactgcaacccccgcctcc

SEQ ID NO: 44683 - DNA, 19 bp, Artificial Sequence
  Synthetic: FXN 3 reverse 9:69045521-69045543; SpCas9
cactgcaacccccgcctcc

SEQ ID NO: 44684 - DNA, 18 bp, Artificial Sequence
  Synthetic: FXN 3 reverse 9:69045522-69045543; SpCas9
actgcaacccccgcctcc

SEQ ID NO: 44685 - DNA, 25 bp, Artificial Sequence
  Synthetic: FXN 3 forward 9:69045516-69045544; SpCas9
cgggaggcgggggttgcagtgagcc

SEQ ID NO: 44686 - DNA, 24 bp, Artificial Sequence
  Synthetic: FXN 3 forward 9:69045517-69045544; SpCas9
gggaggcgggggttgcagtgagcc

SEQ ID NO: 44687 - DNA, 23 bp, Artificial Sequence
  Synthetic: FXN 3 forward 9:69045518-69045544; SpCas9
ggaggcgggggttgcagtgagcc

SEQ ID NO: 44688 - DNA, 22 bp, Artificial Sequence
  Synthetic: FXN 3 forward 9:69045519-69045544; SpCas9
gaggcgggggttgcagtgagcc

SEQ ID NO: 44689 - DNA, 21 bp, Artificial Sequence
  Synthetic: FXN 3 forward 9:69045520-69045544; SpCas9
aggcgggggttgcagtgagcc

SEQ ID NO: 44690 - DNA, 20 bp, Artificial Sequence
  Synthetic: FXN 3 forward 9:69045521-69045544; SpCas9
ggcgggggttgcagtgagcc

SEQ ID NO: 44691 - DNA, 19 bp, Artificial Sequence
  Synthetic: FXN 3 forward 9:69045522-69045544; SpCas9
gcgggggttgcagtgagcc

SEQ ID NO: 44692 - DNA, 18 bp, Artificial Sequence
  Synthetic: FXN 3 forward 9:69045523-69045544; SpCas9
cgggggttgcagtgagcc

SEQ ID NO: 44693 - DNA, 25 bp, Artificial Sequence
  Synthetic: FXN 3 forward 9:69045536-69045564; SpCas9
gagccgagatcgtgccactgcactc

SEQ ID NO: 44694 - DNA, 24 bp, Artificial Sequence
  Synthetic: FXN 3 forward 9:69045537-69045564; SpCas9
agccgagatcgtgccactgcactc

SEQ ID NO: 44695 - DNA, 23 bp, Artificial Sequence
  Synthetic: FXN 3 forward 9:69045538-69045564; SpCas9
gccgagatcgtgccactgcactc

SEQ ID NO: 44696 - DNA, 22 bp, Artificial Sequence
  Synthetic: FXN 3 forward 9:69045539-69045564; SpCas9
ccgagatcgtgccactgcactc

SEQ ID NO: 44697 - DNA, 21 bp, Artificial Sequence
  Synthetic: FXN 3 forward 9:69045540-69045564; SpCas9
cgagatcgtgccactgcactc

SEQ ID NO: 44698 - DNA, 20 bp, Artificial Sequence
  Synthetic: FXN 3 forward 9:69045541-69045564; SpCas9
gagatcgtgccactgcactc

SEQ ID NO: 44699 - DNA, 19 bp, Artificial Sequence
  Synthetic: FXN 3 forward 9:69045542-69045564; SpCas9
agatcgtgccactgcactc

SEQ ID NO: 44700 - DNA, 18 bp, Artificial Sequence
  Synthetic: FXN 3 forward 9:69045543-69045564; SpCas9
gatcgtgccactgcactc

SEQ ID NO: 44701 - DNA, 25 bp, Artificial Sequence
  Synthetic: FXN 3 reverse 9:69045539-69045567; SpCas9
aggctggagtgcagtggcacgatct

SEQ ID NO: 44702 - DNA, 24 bp, Artificial Sequence
  Synthetic: FXN 3 reverse 9:69045540-69045567; SpCas9
ggctggagtgcagtggcacgatct

SEQ ID NO: 44703 - DNA, 23 bp, Artificial Sequence
  Synthetic: FXN 3 reverse 9:69045541-69045567; SpCas9
gctggagtgcagtggcacgatct

SEQ ID NO: 44704 - DNA, 22 bp, Artificial Sequence
  Synthetic: FXN 3 reverse 9:69045542-69045567; SpCas9
ctggagtgcagtggcacgatct

SEQ ID NO: 44705 - DNA, 21 bp, Artificial Sequence
  Synthetic: FXN 3 reverse 9:69045543-69045567; SpCas9
tggagtgcagtggcacgatct

SEQ ID NO: 44706 - DNA, 20 bp, Artificial Sequence
  Synthetic: FXN 3 reverse 9:69045544-69045567; SpCas9
ggagtgcagtggcacgatct

SEQ ID NO: 44707 - DNA, 19 bp, Artificial Sequence
  Synthetic: FXN 3 reverse 9:69045545-69045567; SpCas9
gagtgcagtggcacgatct

SEQ ID NO: 44708 - DNA, 18 bp, Artificial Sequence
  Synthetic: FXN 3 reverse 9:69045546-69045567; SpCas9
agtgcagtggcacgatct

SEQ ID NO: 44709 - DNA, 25 bp, Artificial Sequence
  Synthetic: FXN 3 forward 9:69045541-69045569; SpCas9
gagatcgtgccactgcactccagcc

SEQ ID NO: 44710 - DNA, 24 bp, Artificial Sequence
  Synthetic: FXN 3 forward 9:69045542-69045569; SpCas9
agatcgtgccactgcactccagcc

SEQ ID NO: 44711 - DNA, 23 bp, Artificial Sequence
  Synthetic: FXN 3 forward 9:69045543-69045569; SpCas9
gatcgtgccactgcactccagcc

SEQ ID NO: 44712 - DNA, 22 bp, Artificial Sequence
  Synthetic: FXN 3 forward 9:69045544-69045569; SpCas9
atcgtgccactgcactccagcc

SEQ ID NO: 44713 - DNA, 21 bp, Artificial Sequence
  Synthetic: FXN 3 forward 9:69045545-69045569; SpCas9
tcgtgccactgcactccagcc

SEQ ID NO: 44714 - DNA, 20 bp, Artificial Sequence
  Synthetic: FXN 3 forward 9:69045546-69045569; SpCas9
cgtgccactgcactccagcc

SEQ ID NO: 44715 - DNA, 19 bp, Artificial Sequence
  Synthetic: FXN 3 forward 9:69045547-69045569; SpCas9
gtgccactgcactccagcc

SEQ ID NO: 44716 - DNA, 18 bp, Artificial Sequence
  Synthetic: FXN 3 forward 9:69045548-69045569; SpCas9
tgccactgcactccagcc

SEQ ID NO: 44717 - DNA, 25 bp, Artificial Sequence
  Synthetic: FXN 3 forward 9:69045542-69045570; SpCas9
agatcgtgccactgcactccagcct

SEQ ID NO: 44718 - DNA, 24 bp, Artificial Sequence
  Synthetic: FXN 3 forward 9:69045543-69045570; SpCas9
gatcgtgccactgcactccagcct

SEQ ID NO: 44719 - DNA, 23 bp, Artificial Sequence
  Synthetic: FXN 3 forward 9:69045544-69045570; SpCas9
atcgtgccactgcactccagcct

SEQ ID NO: 44720 - DNA, 22 bp, Artificial Sequence
  Synthetic: FXN 3 forward 9:69045545-69045570; SpCas9
tcgtgccactgcactccagcct

SEQ ID NO: 44721 - DNA, 21 bp, Artificial Sequence
  Synthetic: FXN 3 forward 9:69045546-69045570; SpCas9
cgtgccactgcactccagcct

SEQ ID NO: 44722 - DNA, 20 bp, Artificial Sequence
  Synthetic: FXN 3 forward 9:69045547-69045570; SpCas9
gtgccactgcactccagcct

SEQ ID NO: 44723 - DNA, 19 bp, Artificial Sequence
  Synthetic: FXN 3 forward 9:69045548-69045570; SpCas9
tgccactgcactccagcct

SEQ ID NO: 44724 - DNA, 18 bp, Artificial Sequence
  Synthetic: FXN 3 forward 9:69045549-69045570; SpCas9
gccactgcactccagcct

SEQ ID NO: 44725 - DNA, 25 bp, Artificial Sequence
  Synthetic: FXN 3 forward 9:69045548-69045576; SpCas9
tgccactgcactccagcctgggcga

SEQ ID NO: 44726 - DNA, 24 bp, Artificial Sequence
  Synthetic: FXN 3 forward 9:69045549-69045576; SpCas9
gccactgcactccagcctgggcga

SEQ ID NO: 44727 - DNA, 23 bp, Artificial Sequence
  Synthetic: FXN 3 forward 9:69045550-69045576; SpCas9
ccactgcactccagcctgggcga

SEQ ID NO: 44728 - DNA, 22 bp, Artificial Sequence
  Synthetic: FXN 3 forward 9:69045551-69045576; SpCas9
cactgcactccagcctgggcga

SEQ ID NO: 44729 - DNA, 21 bp, Artificial Sequence
  Synthetic: FXN 3 forward 9:69045552-69045576; SpCas9
actgcactccagcctgggcga

SEQ ID NO: 44730 - DNA, 20 bp, Artificial Sequence
  Synthetic: FXN 3 forward 9:69045553-69045576; SpCas9
ctgcactccagcctgggcga

SEQ ID NO: 44731 - DNA, 19 bp, Artificial Sequence
  Synthetic: FXN 3 forward 9:69045554-69045576; SpCas9
tgcactccagcctgggcga

SEQ ID NO: 44732 - DNA, 18 bp, Artificial Sequence
  Synthetic: FXN 3 forward 9:69045555-69045576; SpCas9
gcactccagcctgggcga

SEQ ID NO: 44733 - DNA, 25 bp, Artificial Sequence
  Synthetic: FXN 3 forward 9:69045550-69045578; SpCas9
ccactgcactccagcctgggcgaca

SEQ ID NO: 44734 - DNA, 24 bp, Artificial Sequence
  Synthetic: FXN 3 forward 9:69045551-69045578; SpCas9
cactgcactccagcctgggcgaca

SEQ ID NO: 44735 - DNA, 23 bp, Artificial Sequence
  Synthetic: FXN 3 forward 9:69045552-69045578; SpCas9
actgcactccagcctgggcgaca

SEQ ID NO: 44736 - DNA, 22 bp, Artificial Sequence
  Synthetic: FXN 3 forward 9:69045553-69045578; SpCas9
ctgcactccagcctgggcgaca

SEQ ID NO: 44737 - DNA, 21 bp, Artificial Sequence
  Synthetic: FXN 3 forward 9:69045554-69045578; SpCas9
tgcactccagcctgggcgaca

SEQ ID NO: 44738 - DNA, 20 bp, Artificial Sequence
  Synthetic: FXN 3 forward 9:69045555-69045578; SpCas9
gcactccagcctgggcgaca

SEQ ID NO: 44739 - DNA, 19 bp, Artificial Sequence
  Synthetic: FXN 3 forward 9:69045556-69045578; SpCas9
cactccagcctgggcgaca

SEQ ID NO: 44740 - DNA, 18 bp, Artificial Sequence
  Synthetic: FXN 3 forward 9:69045557-69045578; SpCas9
actccagcctgggcgaca

SEQ ID NO: 44741 - DNA, 25 bp, Artificial Sequence
  Synthetic: FXN 3 reverse 9:69045550-69045578; SpCas9
ctctgtcgcccaggctggagtgcag

SEQ ID NO: 44742 - DNA, 24 bp, Artificial Sequence
  Synthetic: FXN 3 reverse 9:69045551-69045578; SpCas9
tctgtcgcccaggctggagtgcag

SEQ ID NO: 44743 - DNA, 23 bp, Artificial Sequence
  Synthetic: FXN 3 reverse 9:69045552-69045578; SpCas9
ctgtcgcccaggctggagtgcag

SEQ ID NO: 44744 - DNA, 22 bp, Artificial Sequence
  Synthetic: FXN 3 reverse 9:69045553-69045578; SpCas9
tgtcgcccaggctggagtgcag

SEQ ID NO: 44745 - DNA, 21 bp, Artificial Sequence
  Synthetic: FXN 3 reverse 9:69045554-69045578; SpCas9
gtcgcccaggctggagtgcag

SEQ ID NO: 44746 - DNA, 20 bp, Artificial Sequence
  Synthetic: FXN 3 reverse 9:69045555-69045578; SpCas9
tcgcccaggctggagtgcag

SEQ ID NO: 44747 - DNA, 19 bp, Artificial Sequence
  Synthetic: FXN 3 reverse 9:69045556-69045578; SpCas9
cgcccaggctggagtgcag

SEQ ID NO: 44748 - DNA, 18 bp, Artificial Sequence
  Synthetic: FXN 3 reverse 9:69045557-69045578; SpCas9
gcccaggctggagtgcag

SEQ ID NO: 44749 - DNA, 25 bp, Artificial Sequence
  Synthetic: FXN 3 reverse 9:69045553-69045581; SpCas9
tcgctctgtcgcccaggctggagtg

SEQ ID NO: 44750 - DNA, 24 bp, Artificial Sequence
  Synthetic: FXN 3 reverse 9:69045554-69045581; SpCas9
cgctctgtcgcccaggctggagtg

SEQ ID NO: 44751 - DNA, 23 bp, Artificial Sequence
  Synthetic: FXN 3 reverse 9:69045555-69045581; SpCas9
gctctgtcgcccaggctggagtg

SEQ ID NO: 44752 - DNA, 22 bp, Artificial Sequence
  Synthetic: FXN 3 reverse 9:69045556-69045581; SpCas9
ctctgtcgcccaggctggagtg

SEQ ID NO: 44753 - DNA, 21 bp, Artificial Sequence
  Synthetic: FXN 3 reverse 9:69045557-69045581; SpCas9
tctgtcgcccaggctggagtg

SEQ ID NO: 44754 - DNA, 20 bp, Artificial Sequence
  Synthetic: FXN 3 reverse 9:69045558-69045581; SpCas9
ctgtcgcccaggctggagtg

SEQ ID NO: 44755 - DNA, 19 bp, Artificial Sequence
  Synthetic: FXN 3 reverse 9:69045559-69045581; SpCas9
tgtcgcccaggctggagtg

SEQ ID NO: 44756 - DNA, 18 bp, Artificial Sequence
  Synthetic: FXN 3 reverse 9:69045560-69045581; SpCas9
gtcgcccaggctggagtg

SEQ ID NO: 44757 - DNA, 25 bp, Artificial Sequence
  Synthetic: FXN 3 forward 9:69045554-69045582; SpCas9
tgcactccagcctgggcgacagagc

SEQ ID NO: 44758 - DNA, 24 bp, Artificial Sequence
  Synthetic: FXN 3 forward 9:69045555-69045582; SpCas9
gcactccagcctgggcgacagagc

SEQ ID NO: 44759 - DNA, 23 bp, Artificial Sequence
  Synthetic: FXN 3 forward 9:69045556-69045582; SpCas9
cactccagcctgggcgacagagc

SEQ ID NO: 44760 - DNA, 22 bp, Artificial Sequence
  Synthetic: FXN 3 forward 9:69045557-69045582; SpCas9
actccagcctgggcgacagagc

SEQ ID NO: 44761 - DNA, 21 bp, Artificial Sequence
  Synthetic: FXN 3 forward 9:69045558-69045582; SpCas9
ctccagcctgggcgacagagc

SEQ ID NO: 44762 - DNA, 20 bp, Artificial Sequence
  Synthetic: FXN 3 forward 9:69045559-69045582; SpCas9
tccagcctgggcgacagagc

SEQ ID NO: 44763 - DNA, 19 bp, Artificial Sequence
  Synthetic: FXN 3 forward 9:69045560-69045582; SpCas9
ccagcctgggcgacagagc

SEQ ID NO: 44764 - DNA, 18 bp, Artificial Sequence
  Synthetic: FXN 3 forward 9:69045561-69045582; SpCas9
cagcctgggcgacagagc

SEQ ID NO: 44765 - DNA, 25 bp, Artificial Sequence
  Synthetic: FXN 3 reverse 9:69045558-69045586; SpCas9
aagtctcgctctgtcgcccaggctg

SEQ ID NO: 44766 - DNA, 24 bp, Artificial Sequence
  Synthetic: FXN 3 reverse 9:69045559-69045586; SpCas9
agtctcgctctgtcgcccaggctg

SEQ ID NO: 44767 - DNA, 23 bp, Artificial Sequence
  Synthetic: FXN 3 reverse 9:69045560-69045586; SpCas9
gtctcgctctgtcgcccaggctg

SEQ ID NO: 44768 - DNA, 22 bp, Artificial Sequence
  Synthetic: FXN 3 reverse 9:69045561-69045586; SpCas9
tctcgctctgtcgcccaggctg

SEQ ID NO: 44769 - DNA, 21 bp, Artificial Sequence
  Synthetic: FXN 3 reverse 9:69045562-69045586; SpCas9
ctcgctctgtcgcccaggctg

SEQ ID NO: 44770 - DNA, 20 bp, Artificial Sequence
  Synthetic: FXN 3 reverse 9:69045563-69045586; SpCas9
tcgctctgtcgcccaggctg

SEQ ID NO: 44771 - DNA, 19 bp, Artificial Sequence
  Synthetic: FXN 3 reverse 9:69045564-69045586; SpCas9
cgctctgtcgcccaggctg

SEQ ID NO: 44772 - DNA, 18 bp, Artificial Sequence
  Synthetic: FXN 3 reverse 9:69045565-69045586; SpCas9
gctctgtcgcccaggctg

SEQ ID NO: 44773 - DNA, 25 bp, Artificial Sequence
  Synthetic: FXN 3 reverse 9:69045560-69045588; SpCas9
tgaagtctcgctctgtcgcccaggc

SEQ ID NO: 44774 - DNA, 24 bp, Artificial Sequence
  Synthetic: FXN 3 reverse 9:69045561-69045588; SpCas9
gaagtctcgctctgtcgcccaggc

SEQ ID NO: 44775 - DNA, 23 bp, Artificial Sequence
  Synthetic: FXN 3 reverse 9:69045562-69045588; SpCas9
aagtctcgctctgtcgcccaggc

SEQ ID NO: 44776 - DNA, 22 bp, Artificial Sequence
  Synthetic: FXN 3 reverse 9:69045563-69045588; SpCas9
agtctcgctctgtcgcccaggc

SEQ ID NO: 44777 - DNA, 21 bp, Artificial Sequence
  Synthetic: FXN 3 reverse 9:69045564-69045588; SpCas9
gtctcgctctgtcgcccaggc

SEQ ID NO: 44778 - DNA, 20 bp, Artificial Sequence
  Synthetic: FXN 3 reverse 9:69045565-69045588; SpCas9
tctcgctctgtcgcccaggc

SEQ ID NO: 44779 - DNA, 19 bp, Artificial Sequence
  Synthetic: FXN 3 reverse 9:69045566-69045588; SpCas9
ctcgctctgtcgcccaggc

SEQ ID NO: 44780 - DNA, 18 bp, Artificial Sequence
  Synthetic: FXN 3 reverse 9:69045567-69045588; SpCas9
tcgctctgtcgcccaggc

SEQ ID NO: 44781 - DNA, 25 bp, Artificial Sequence
  Synthetic: FXN 3 reverse 9:69045564-69045592; SpCas9
gagatgaagtctcgctctgtcgccc

SEQ ID NO: 44782 - DNA, 24 bp, Artificial Sequence
  Synthetic: FXN 3 reverse 9:69045565-69045592; SpCas9
agatgaagtctcgctctgtcgccc

SEQ ID NO: 44783 - DNA, 23 bp, Artificial Sequence
  Synthetic: FXN 3 reverse 9:69045566-69045592; SpCas9
gatgaagtctcgctctgtcgccc

SEQ ID NO: 44784 - DNA, 22 bp, Artificial Sequence
  Synthetic: FXN 3 reverse 9:69045567-69045592; SpCas9
atgaagtctcgctctgtcgccc

SEQ ID NO: 44785 - DNA, 21 bp, Artificial Sequence
  Synthetic: FXN 3 reverse 9:69045568-69045592; SpCas9
tgaagtctcgctctgtcgccc

SEQ ID NO: 44786 - DNA, 20 bp, Artificial Sequence
  Synthetic: FXN 3 reverse 9:69045569-69045592; SpCas9
gaagtctcgctctgtcgccc

SEQ ID NO: 44787 - DNA, 19 bp, Artificial Sequence
  Synthetic: FXN 3 reverse 9:69045570-69045592; SpCas9
aagtctcgctctgtcgccc

SEQ ID NO: 44788 - DNA, 18 bp, Artificial Sequence
  Synthetic: FXN 3 reverse 9:69045571-69045592; SpCas9
agtctcgctctgtcgccc

SEQ ID NO: 44789 - DNA, 25 bp, Artificial Sequence
  Synthetic: FXN 3 reverse 9:69045565-69045593; SpCas9
tgagatgaagtctcgctctgtcgcc

SEQ ID NO: 44790 - DNA, 24 bp, Artificial Sequence
  Synthetic: FXN 3 reverse 9:69045566-69045593; SpCas9
gagatgaagtctcgctctgtcgcc

SEQ ID NO: 44791 - DNA, 23 bp, Artificial Sequence
  Synthetic: FXN 3 reverse 9:69045567-69045593; SpCas9
agatgaagtctcgctctgtcgcc

SEQ ID NO: 44792 - DNA, 22 bp, Artificial Sequence
  Synthetic: FXN 3 reverse 9:69045568-69045593; SpCas9
gatgaagtctcgctctgtcgcc

SEQ ID NO: 44793 - DNA, 21 bp, Artificial Sequence
  Synthetic: FXN 3 reverse 9:69045569-69045593; SpCas9
atgaagtctcgctctgtcgcc

SEQ ID NO: 44794 - DNA, 20 bp, Artificial Sequence
  Synthetic: FXN 3 reverse 9:69045570-69045593; SpCas9
tgaagtctcgctctgtcgcc

SEQ ID NO: 44795 - DNA, 19 bp, Artificial Sequence
  Synthetic: FXN 3 reverse 9:69045571-69045593; SpCas9
gaagtctcgctctgtcgcc

SEQ ID NO: 44796 - DNA, 18 bp, Artificial Sequence
  Synthetic: FXN 3 reverse 9:69045572-69045593; SpCas9
aagtctcgctctgtcgcc

SEQ ID NO: 44797 - DNA, 25 bp, Artificial Sequence
  Synthetic: FXN 3 reverse 9:69045583-69045611; SpCas9
gtttttgttttttgtttttgagatg

SEQ ID NO: 44798 - DNA, 24 bp, Artificial Sequence
  Synthetic: FXN 3 reverse 9:69045584-69045611; SpCas9
tttttgttttttgtttttgagatg

SEQ ID NO: 44799 - DNA, 23 bp, Artificial Sequence
  Synthetic: FXN 3 reverse 9:69045585-69045611; SpCas9
ttttgttttttgtttttgagatg

SEQ ID NO: 44800 - DNA, 22 bp, Artificial Sequence
  Synthetic: FXN 3 reverse 9:69045586-69045611; SpCas9
tttgttttttgtttttgagatg

SEQ ID NO: 44801 - DNA, 21 bp, Artificial Sequence
  Synthetic: FXN 3 reverse 9:69045587-69045611; SpCas9
ttgttttttgtttttgagatg

SEQ ID NO: 44802 - DNA, 20 bp, Artificial Sequence
  Synthetic: FXN 3 reverse 9:69045588-69045611; SpCas9
tgttttttgtttttgagatg

SEQ ID NO: 44803 - DNA, 19 bp, Artificial Sequence
  Synthetic: FXN 3 reverse 9:69045589-69045611; SpCas9
gttttttgtttttgagatg

SEQ ID NO: 44804 - DNA, 18 bp, Artificial Sequence
  Synthetic: FXN 3 reverse 9:69045590-69045611; SpCas9
ttttttgtttttgagatg

SEQ ID NO: 44805 - DNA, 25 bp, Artificial Sequence
  Synthetic: FXN 3 reverse 9:69045589-69045617; SpCas9
tttttggtttttgttttttgttttt

SEQ ID NO: 44806 - DNA, 24 bp, Artificial Sequence
  Synthetic: FXN 3 reverse 9:69045590-69045617; SpCas9
ttttggtttttgttttttgttttt

SEQ ID NO: 44807 - DNA, 23 bp, Artificial Sequence
  Synthetic: FXN 3 reverse 9:69045591-69045617; SpCas9
tttggtttttgttttttgttttt

SEQ ID NO: 44808 - DNA, 22 bp, Artificial Sequence
  Synthetic: FXN 3 reverse 9:69045592-69045617; SpCas9
ttggtttttgttttttgttttt

SEQ ID NO: 44809 - DNA, 21 bp, Artificial Sequence
  Synthetic: FXN 3 reverse 9:69045593-69045617; SpCas9
tggtttttgttttttgttttt

SEQ ID NO: 44810 - DNA, 20 bp, Artificial Sequence
  Synthetic: FXN 3 reverse 9:69045594-69045617; SpCas9
ggtttttgttttttgttttt

SEQ ID NO: 44811 - DNA, 19 bp, Artificial Sequence
  Synthetic: FXN 3 reverse 9:69045595-69045617; SpCas9
gtttttgttttttgttttt

SEQ ID NO: 44812 - DNA, 18 bp, Artificial Sequence
  Synthetic: FXN 3 reverse 9:69045596-69045617; SpCas9
tttttgttttttgttttt

SEQ ID NO: 44813 - DNA, 25 bp, Artificial Sequence
  Synthetic: FXN 3 forward 9:69045601-69045629; SpCas9
aaacaaaaaccaaaaaaaaaaactt

SEQ ID NO: 44814 - DNA, 24 bp, Artificial Sequence
  Synthetic: FXN 3 forward 9:69045602-69045629; SpCas9
aacaaaaaccaaaaaaaaaaactt

SEQ ID NO: 44815 - DNA, 23 bp, Artificial Sequence
  Synthetic: FXN 3 forward 9:69045603-69045629; SpCas9
acaaaaaccaaaaaaaaaaactt

SEQ ID NO: 44816 - DNA, 22 bp, Artificial Sequence
  Synthetic: FXN 3 forward 9:69045604-69045629; SpCas9
caaaaaccaaaaaaaaaaactt

SEQ ID NO: 44817 - DNA, 21 bp, Artificial Sequence
  Synthetic: FXN 3 forward 9:69045605-69045629; SpCas9
aaaaaccaaaaaaaaaaactt

SEQ ID NO: 44818 - DNA, 20 bp, Artificial Sequence
  Synthetic: FXN 3 forward 9:69045606-69045629; SpCas9
aaaaccaaaaaaaaaaactt

SEQ ID NO: 44819 - DNA, 19 bp, Artificial Sequence
  Synthetic: FXN 3 forward 9:69045607-69045629; SpCas9
aaaccaaaaaaaaaaactt

SEQ ID NO: 44820 - DNA, 18 bp, Artificial Sequence
  Synthetic: FXN 3 forward 9:69045608-69045629; SpCas9
aaccaaaaaaaaaaactt

SEQ ID NO: 44821 - DNA, 25 bp, Artificial Sequence
  Synthetic: FXN 3 reverse 9:69045610-69045638; SpCas9
ataatcatgctgaagtttttttttt

SEQ ID NO: 44822 - DNA, 24 bp, Artificial Sequence
  Synthetic: FXN 3 reverse 9:69045611-69045638; SpCas9
taatcatgctgaagtttttttttt

SEQ ID NO: 44823 - DNA, 23 bp, Artificial Sequence
  Synthetic: FXN 3 reverse 9:69045612-69045638; SpCas9
aatcatgctgaagtttttttttt

SEQ ID NO: 44824 - DNA, 22 bp, Artificial Sequence
  Synthetic: FXN 3 reverse 9:69045613-69045638; SpCas9
atcatgctgaagtttttttttt

SEQ ID NO: 44825 - DNA, 21 bp, Artificial Sequence
  Synthetic: FXN 3 reverse 9:69045614-69045638; SpCas9
tcatgctgaagtttttttttt

SEQ ID NO: 44826 - DNA, 20 bp, Artificial Sequence
  Synthetic: FXN 3 reverse 9:69045615-69045638; SpCas9
catgctgaagtttttttttt

SEQ ID NO: 44827 - DNA, 19 bp, Artificial Sequence
  Synthetic: FXN 3 reverse 9:69045616-69045638; SpCas9
atgctgaagtttttttttt

SEQ ID NO: 44828 - DNA, 18 bp, Artificial Sequence
  Synthetic: FXN 3 reverse 9:69045617-69045638; SpCas9
tgctgaagtttttttttt

SEQ ID NO: 44829 - DNA, 25 bp, Artificial Sequence
  Synthetic: FXN 3 reverse 9:69045623-69045651; SpCas9
gcattttggttaaataatcatgctg

SEQ ID NO: 44830 - DNA, 24 bp, Artificial Sequence
  Synthetic: FXN 3 reverse 9:69045624-69045651; SpCas9
cattttggttaaataatcatgctg

SEQ ID NO: 44831 - DNA, 23 bp, Artificial Sequence
  Synthetic: FXN 3 reverse 9:69045625-69045651; SpCas9
attttggttaaataatcatgctg

SEQ ID NO: 44832 - DNA, 22 bp, Artificial Sequence
  Synthetic: FXN 3 reverse 9:69045626-69045651; SpCas9
ttttggttaaataatcatgctg

SEQ ID NO: 44833 - DNA, 21 bp, Artificial Sequence
  Synthetic: FXN 3 reverse 9:69045627-69045651; SpCas9
tttggttaaataatcatgctg

SEQ ID NO: 44834 - DNA, 20 bp, Artificial Sequence
  Synthetic: FXN 3 reverse 9:69045628-69045651; SpCas9
ttggttaaataatcatgctg

SEQ ID NO: 44835 - DNA, 19 bp, Artificial Sequence
  Synthetic: FXN 3 reverse 9:69045629-69045651; SpCas9
tggttaaataatcatgctg

SEQ ID NO: 44836 - DNA, 18 bp, Artificial Sequence
  Synthetic: FXN 3 reverse 9:69045630-69045651; SpCas9
ggttaaataatcatgctg

SEQ ID NO: 44837 - DNA, 25 bp, Artificial Sequence
  Synthetic: FXN 3 forward 9:69045625-69045653; SpCas9
tcagcatgattatttaaccaaaatg

SEQ ID NO: 44838 - DNA, 24 bp, Artificial Sequence
  Synthetic: FXN 3 forward 9:69045626-69045653; SpCas9
cagcatgattatttaaccaaaatg

SEQ ID NO: 44839 - DNA, 23 bp, Artificial Sequence
  Synthetic: FXN 3 forward 9:69045627-69045653; SpCas9
agcatgattatttaaccaaaatg

SEQ ID NO: 44840 - DNA, 22 bp, Artificial Sequence
  Synthetic: FXN 3 forward 9:69045628-69045653; SpCas9
gcatgattatttaaccaaaatg

SEQ ID NO: 44841 - DNA, 21 bp, Artificial Sequence
  Synthetic: FXN 3 forward 9:69045629-69045653; SpCas9
catgattatttaaccaaaatg

SEQ ID NO: 44842 - DNA, 20 bp, Artificial Sequence
  Synthetic: FXN 3 forward 9:69045630-69045653; SpCas9
atgattatttaaccaaaatg

SEQ ID NO: 44843 - DNA, 19 bp, Artificial Sequence
  Synthetic: FXN 3 forward 9:69045631-69045653; SpCas9
tgattatttaaccaaaatg

SEQ ID NO: 44844 - DNA, 18 bp, Artificial Sequence
  Synthetic: FXN 3 forward 9:69045632-69045653; SpCas9
gattatttaaccaaaatg

SEQ ID NO: 44845 - DNA, 25 bp, Artificial Sequence
  Synthetic: FXN 3 forward 9:69045626-69045654; SpCas9
cagcatgattatttaaccaaaatgc

SEQ ID NO: 44846 - DNA, 24 bp, Artificial Sequence
  Synthetic: FXN 3 forward 9:69045627-69045654; SpCas9
agcatgattatttaaccaaaatgc

SEQ ID NO: 44847 - DNA, 23 bp, Artificial Sequence
  Synthetic: FXN 3 forward 9:69045628-69045654; SpCas9
gcatgattatttaaccaaaatgc

SEQ ID NO: 44848 - DNA, 22 bp, Artificial Sequence
  Synthetic: FXN 3 forward 9:69045629-69045654; SpCas9
catgattatttaaccaaaatgc

SEQ ID NO: 44849 - DNA, 21 bp, Artificial Sequence
  Synthetic: FXN 3 forward 9:69045630-69045654; SpCas9
atgattatttaaccaaaatgc

SEQ ID NO: 44850 - DNA, 20 bp, Artificial Sequence
  Synthetic: FXN 3 forward 9:69045631-69045654; SpCas9
tgattatttaaccaaaatgc

SEQ ID NO: 44851 - DNA, 19 bp, Artificial Sequence
  Synthetic: FXN 3 forward 9:69045632-69045654; SpCas9
gattatttaaccaaaatgc

SEQ ID NO: 44852 - DNA, 18 bp, Artificial Sequence
  Synthetic: FXN 3 forward 9:69045633-69045654; SpCas9
attatttaaccaaaatgc

SEQ ID NO: 44853 - DNA, 25 bp, Artificial Sequence
  Synthetic: FXN 3 forward 9:69045630-69045658; SpCas9
atgattatttaaccaaaatgcaggt

SEQ ID NO: 44854 - DNA, 24 bp, Artificial Sequence
  Synthetic: FXN 3 forward 9:69045631-69045658; SpCas9
tgattatttaaccaaaatgcaggt

SEQ ID NO: 44855 - DNA, 23 bp, Artificial Sequence
  Synthetic: FXN 3 forward 9:69045632-69045658; SpCas9
gattatttaaccaaaatgcaggt

SEQ ID NO: 44856 - DNA, 22 bp, Artificial Sequence
  Synthetic: FXN 3 forward 9:69045633-69045658; SpCas9
attatttaaccaaaatgcaggt

SEQ ID NO: 44857 - DNA, 21 bp, Artificial Sequence
  Synthetic: FXN 3 forward 9:69045634-69045658; SpCas9
ttatttaaccaaaatgcaggt

SEQ ID NO: 44858 - DNA, 20 bp, Artificial Sequence
  Synthetic: FXN 3 forward 9:69045635-69045658; SpCas9
tatttaaccaaaatgcaggt

SEQ ID NO: 44859 - DNA, 19 bp, Artificial Sequence
  Synthetic: FXN 3 forward 9:69045636-69045658; SpCas9
atttaaccaaaatgcaggt

SEQ ID NO: 44860 - DNA, 18 bp, Artificial Sequence
  Synthetic: FXN 3 forward 9:69045637-69045658; SpCas9
tttaaccaaaatgcaggt

SEQ ID NO: 44861 - DNA, 25 bp, Artificial Sequence
  Synthetic: FXN 3 forward 9:69045641-69045669; SpCas9
accaaaatgcaggttagttgttcac

SEQ ID NO: 44862 - DNA, 24 bp, Artificial Sequence
  Synthetic: FXN 3 forward 9:69045642-69045669; SpCas9
ccaaaatgcaggttagttgttcac

SEQ ID NO: 44863 - DNA, 23 bp, Artificial Sequence
  Synthetic: FXN 3 forward 9:69045643-69045669; SpCas9
caaaatgcaggttagttgttcac

SEQ ID NO: 44864 - DNA, 22 bp, Artificial Sequence
  Synthetic: FXN 3 forward 9:69045644-69045669; SpCas9
aaaatgcaggttagttgttcac

SEQ ID NO: 44865 - DNA, 21 bp, Artificial Sequence
  Synthetic: FXN 3 forward 9:69045645-69045669; SpCas9
aaatgcaggttagttgttcac

SEQ ID NO: 44866 - DNA, 20 bp, Artificial Sequence
  Synthetic: FXN 3 forward 9:69045646-69045669; SpCas9
aatgcaggttagttgttcac

SEQ ID NO: 44867 - DNA, 19 bp, Artificial Sequence
  Synthetic: FXN 3 forward 9:69045647-69045669; SpCas9
atgcaggttagttgttcac

SEQ ID NO: 44868 - DNA, 18 bp, Artificial Sequence
  Synthetic: FXN 3 forward 9:69045648-69045669; SpCas9
tgcaggttagttgttcac

SEQ ID NO: 44869 - DNA, 25 bp, Artificial Sequence
  Synthetic: FXN 3 reverse 9:69045642-69045670; SpCas9
tccggtgaacaactaacctgcattt

SEQ ID NO: 44870 - DNA, 24 bp, Artificial Sequence
  Synthetic: FXN 3 reverse 9:69045643-69045670; SpCas9
ccggtgaacaactaacctgcattt

SEQ ID NO: 44871 - DNA, 23 bp, Artificial Sequence
  Synthetic: FXN 3 reverse 9:69045644-69045670; SpCas9
cggtgaacaactaacctgcattt

SEQ ID NO: 44872 - DNA, 22 bp, Artificial Sequence
  Synthetic: FXN 3 reverse 9:69045645-69045670; SpCas9
ggtgaacaactaacctgcattt

SEQ ID NO: 44873 - DNA, 21 bp, Artificial Sequence
  Synthetic: FXN 3 reverse 9:69045646-69045670; SpCas9
gtgaacaactaacctgcattt

SEQ ID NO: 44874 - DNA, 20 bp, Artificial Sequence
  Synthetic: FXN 3 reverse 9:69045647-69045670; SpCas9
tgaacaactaacctgcattt

SEQ ID NO: 44875 - DNA, 19 bp, Artificial Sequence
  Synthetic: FXN 3 reverse 9:69045648-69045670; SpCas9
gaacaactaacctgcattt

SEQ ID NO: 44876 - DNA, 18 bp, Artificial Sequence
  Synthetic: FXN 3 reverse 9:69045649-69045670; SpCas9
aacaactaacctgcattt

SEQ ID NO: 44877 - DNA, 25 bp, Artificial Sequence
  Synthetic: FXN 3 forward 9:69045647-69045675; SpCas9
atgcaggttagttgttcaccggatg

SEQ ID NO: 44878 - DNA, 24 bp, Artificial Sequence
  Synthetic: FXN 3 forward 9:69045648-69045675; SpCas9
tgcaggttagttgttcaccggatg

SEQ ID NO: 44879 - DNA, 23 bp, Artificial Sequence
  Synthetic: FXN 3 forward 9:69045649-69045675; SpCas9
gcaggttagttgttcaccggatg

SEQ ID NO: 44880 - DNA, 22 bp, Artificial Sequence
  Synthetic: FXN 3 forward 9:69045650-69045675; SpCas9
caggttagttgttcaccggatg

SEQ ID NO: 44881 - DNA, 21 bp, Artificial Sequence
  Synthetic: FXN 3 forward 9:69045651-69045675; SpCas9
aggttagttgttcaccggatg

SEQ ID NO: 44882 - DNA, 20 bp, Artificial Sequence
  Synthetic: FXN 3 forward 9:69045652-69045675; SpCas9
ggttagttgttcaccggatg

SEQ ID NO: 44883 - DNA, 19 bp, Artificial Sequence
  Synthetic: FXN 3 forward 9:69045653-69045675; SpCas9
gttagttgttcaccggatg

SEQ ID NO: 44884 - DNA, 18 bp, Artificial Sequence
  Synthetic: FXN 3 forward 9:69045654-69045675; SpCas9
ttagttgttcaccggatg

SEQ ID NO: 44885 - DNA, 25 bp, Artificial Sequence
  Synthetic: FXN 3 forward 9:69045649-69045677; SpCas9
gcaggttagttgttcaccggatgca

SEQ ID NO: 44886 - DNA, 24 bp, Artificial Sequence
  Synthetic: FXN 3 forward 9:69045650-69045677; SpCas9
caggttagttgttcaccggatgca

SEQ ID NO: 44887 - DNA, 23 bp, Artificial Sequence
  Synthetic: FXN 3 forward 9:69045651-69045677; SpCas9
aggttagttgttcaccggatgca

SEQ ID NO: 44888 - DNA, 22 bp, Artificial Sequence
  Synthetic: FXN 3 forward 9:69045652-69045677; SpCas9
ggttagttgttcaccggatgca

SEQ ID NO: 44889 - DNA, 21 bp, Artificial Sequence
  Synthetic: FXN 3 forward 9:69045653-69045677; SpCas9
gttagttgttcaccggatgca

SEQ ID NO: 44890 - DNA, 20 bp, Artificial Sequence
  Synthetic: FXN 3 forward 9:69045654-69045677; SpCas9
ttagttgttcaccggatgca

SEQ ID NO: 44891 - DNA, 19 bp, Artificial Sequence
  Synthetic: FXN 3 forward 9:69045655-69045677; SpCas9
tagttgttcaccggatgca

SEQ ID NO: 44892 - DNA, 18 bp, Artificial Sequence
  Synthetic: FXN 3 forward 9:69045656-69045677; SpCas9
agttgttcaccggatgca

SEQ ID NO: 44893 - DNA, 25 bp, Artificial Sequence
  Synthetic: FXN 3 forward 9:69045662-69045690; SpCas9
tcaccggatgcagagtccaattaac

SEQ ID NO: 44894 - DNA, 24 bp, Artificial Sequence
  Synthetic: FXN 3 forward 9:69045663-69045690; SpCas9
caccggatgcagagtccaattaac

SEQ ID NO: 44895 - DNA, 23 bp, Artificial Sequence
  Synthetic: FXN 3 forward 9:69045664-69045690; SpCas9
accggatgcagagtccaattaac

SEQ ID NO: 44896 - DNA, 22 bp, Artificial Sequence
  Synthetic: FXN 3 forward 9:69045665-69045690; SpCas9
ccggatgcagagtccaattaac

SEQ ID NO: 44897 - DNA, 21 bp, Artificial Sequence
  Synthetic: FXN 3 forward 9:69045666-69045690; SpCas9
cggatgcagagtccaattaac

SEQ ID NO: 44898 - DNA, 20 bp, Artificial Sequence
  Synthetic: FXN 3 forward 9:69045667-69045690; SpCas9
ggatgcagagtccaattaac

SEQ ID NO: 44899 - DNA, 19 bp, Artificial Sequence
  Synthetic: FXN 3 forward 9:69045668-69045690; SpCas9
gatgcagagtccaattaac

SEQ ID NO: 44900 - DNA, 18 bp, Artificial Sequence
  Synthetic: FXN 3 forward 9:69045669-69045690; SpCas9
atgcagagtccaattaac

SEQ ID NO: 44901 - DNA, 25 bp, Artificial Sequence
  Synthetic: FXN 3 forward 9:69045664-69045692; SpCas9
accggatgcagagtccaattaacaa

SEQ ID NO: 44902 - DNA, 24 bp, Artificial Sequence
  Synthetic: FXN 3 forward 9:69045665-69045692; SpCas9
ccggatgcagagtccaattaacaa

SEQ ID NO: 44903 - DNA, 23 bp, Artificial Sequence
  Synthetic: FXN 3 forward 9:69045666-69045692; SpCas9
cggatgcagagtccaattaacaa

SEQ ID NO: 44904 - DNA, 22 bp, Artificial Sequence
  Synthetic: FXN 3 forward 9:69045667-69045692; SpCas9
ggatgcagagtccaattaacaa

SEQ ID NO: 44905 - DNA, 21 bp, Artificial Sequence
  Synthetic: FXN 3 forward 9:69045668-69045692; SpCas9
gatgcagagtccaattaacaa

SEQ ID NO: 44906 - DNA, 20 bp, Artificial Sequence
  Synthetic: FXN 3 forward 9:69045669-69045692; SpCas9
atgcagagtccaattaacaa

SEQ ID NO: 44907 - DNA, 19 bp, Artificial Sequence
  Synthetic: FXN 3 forward 9:69045670-69045692; SpCas9
tgcagagtccaattaacaa

SEQ ID NO: 44908 - DNA, 18 bp, Artificial Sequence
  Synthetic: FXN 3 forward 9:69045671-69045692; SpCas9
gcagagtccaattaacaa

SEQ ID NO: 44909 - DNA, 25 bp, Artificial Sequence
  Synthetic: FXN 3 reverse 9:69045665-69045693; SpCas9
gctcttgttaattggactctgcatc

SEQ ID NO: 44910 - DNA, 24 bp, Artificial Sequence
  Synthetic: FXN 3 reverse 9:69045666-69045693; SpCas9
ctcttgttaattggactctgcatc

SEQ ID NO: 44911 - DNA, 23 bp, Artificial Sequence
  Synthetic: FXN 3 reverse 9:69045667-69045693; SpCas9
tcttgttaattggactctgcatc

SEQ ID NO: 44912 - DNA, 22 bp, Artificial Sequence
  Synthetic: FXN 3 reverse 9:69045668-69045693; SpCas9
cttgttaattggactctgcatc

SEQ ID NO: 44913 - DNA, 21 bp, Artificial Sequence
  Synthetic: FXN 3 reverse 9:69045669-69045693; SpCas9
ttgttaattggactctgcatc

SEQ ID NO: 44914 - DNA, 20 bp, Artificial Sequence
  Synthetic: FXN 3 reverse 9:69045670-69045693; SpCas9
tgttaattggactctgcatc

SEQ ID NO: 44915 - DNA, 19 bp, Artificial Sequence
  Synthetic: FXN 3 reverse 9:69045671-69045693; SpCas9
gttaattggactctgcatc

SEQ ID NO: 44916 - DNA, 18 bp, Artificial Sequence
  Synthetic: FXN 3 reverse 9:69045672-69045693; SpCas9
ttaattggactctgcatc

SEQ ID NO: 44917 - DNA, 25 bp, Artificial Sequence
  Synthetic: FXN 3 forward 9:69045668-69045696; SpCas9
gatgcagagtccaattaacaagagc

SEQ ID NO: 44918 - DNA, 24 bp, Artificial Sequence
  Synthetic: FXN 3 forward 9:69045669-69045696; SpCas9
atgcagagtccaattaacaagagc

SEQ ID NO: 44919 - DNA, 23 bp, Artificial Sequence
  Synthetic: FXN 3 forward 9:69045670-69045696; SpCas9
tgcagagtccaattaacaagagc

SEQ ID NO: 44920 - DNA, 22 bp, Artificial Sequence
  Synthetic: FXN 3 forward 9:69045671-69045696; SpCas9
gcagagtccaattaacaagagc

SEQ ID NO: 44921 - DNA, 21 bp, Artificial Sequence
  Synthetic: FXN 3 forward 9:69045672-69045696; SpCas9
cagagtccaattaacaagagc

SEQ ID NO: 44922 - DNA, 20 bp, Artificial Sequence
  Synthetic: FXN 3 forward 9:69045673-69045696; SpCas9
agagtccaattaacaagagc

SEQ ID NO: 44923 - DNA, 19 bp, Artificial Sequence
  Synthetic: FXN 3 forward 9:69045674-69045696; SpCas9
gagtccaattaacaagagc

SEQ ID NO: 44924 - DNA, 18 bp, Artificial Sequence
  Synthetic: FXN 3 forward 9:69045675-69045696; SpCas9
agtccaattaacaagagc

SEQ ID NO: 44925 - DNA, 25 bp, Artificial Sequence
  Synthetic: FXN 3 forward 9:69045669-69045697; SpCas9
atgcagagtccaattaacaagagca

SEQ ID NO: 44926 - DNA, 24 bp, Artificial Sequence
  Synthetic: FXN 3 forward 9:69045670-69045697; SpCas9
tgcagagtccaattaacaagagca

SEQ ID NO: 44927 - DNA, 23 bp, Artificial Sequence
  Synthetic: FXN 3 forward 9:69045671-69045697; SpCas9
gcagagtccaattaacaagagca

SEQ ID NO: 44928 - DNA, 22 bp, Artificial Sequence
  Synthetic: FXN 3 forward 9:69045672-69045697; SpCas9
cagagtccaattaacaagagca

SEQ ID NO: 44929 - DNA, 21 bp, Artificial Sequence
  Synthetic: FXN 3 forward 9:69045673-69045697; SpCas9
agagtccaattaacaagagca

SEQ ID NO: 44930 - DNA, 20 bp, Artificial Sequence
  Synthetic: FXN 3 forward 9:69045674-69045697; SpCas9
gagtccaattaacaagagca

SEQ ID NO: 44931 - DNA, 19 bp, Artificial Sequence
  Synthetic: FXN 3 forward 9:69045675-69045697; SpCas9
agtccaattaacaagagca

SEQ ID NO: 44932 - DNA, 18 bp, Artificial Sequence
  Synthetic: FXN 3 forward 9:69045676-69045697; SpCas9
gtccaattaacaagagca

SEQ ID NO: 44933 - DNA, 25 bp, Artificial Sequence
  Synthetic: FXN 3 forward 9:69045674-69045702; SpCas9
gagtccaattaacaagagcaaggcc

SEQ ID NO: 44934 - DNA, 24 bp, Artificial Sequence
  Synthetic: FXN 3 forward 9:69045675-69045702; SpCas9
agtccaattaacaagagcaaggcc

SEQ ID NO: 44935 - DNA, 23 bp, Artificial Sequence
  Synthetic: FXN 3 forward 9:69045676-69045702; SpCas9
gtccaattaacaagagcaaggcc

SEQ ID NO: 44936 - DNA, 22 bp, Artificial Sequence
  Synthetic: FXN 3 forward 9:69045677-69045702; SpCas9
tccaattaacaagagcaaggcc

SEQ ID NO: 44937 - DNA, 21 bp, Artificial Sequence
  Synthetic: FXN 3 forward 9:69045678-69045702; SpCas9
ccaattaacaagagcaaggcc

SEQ ID NO: 44938 - DNA, 20 bp, Artificial Sequence
  Synthetic: FXN 3 forward 9:69045679-69045702; SpCas9
caattaacaagagcaaggcc

SEQ ID NO: 44939 - DNA, 19 bp, Artificial Sequence
  Synthetic: FXN 3 forward 9:69045680-69045702; SpCas9
aattaacaagagcaaggcc

SEQ ID NO: 44940 - DNA, 18 bp, Artificial Sequence
  Synthetic: FXN 3 forward 9:69045681-69045702; SpCas9
attaacaagagcaaggcc

SEQ ID NO: 44941 - DNA, 25 bp, Artificial Sequence
  Synthetic: FXN 3 reverse 9:69045678-69045706; SpCas9
ggtaccaggccttgctcttgttaat

SEQ ID NO: 44942 - DNA, 24 bp, Artificial Sequence
  Synthetic: FXN 3 reverse 9:69045679-69045706; SpCas9
gtaccaggccttgctcttgttaat

SEQ ID NO: 44943 - DNA, 23 bp, Artificial Sequence
  Synthetic: FXN 3 reverse 9:69045680-69045706; SpCas9
taccaggccttgctcttgttaat

SEQ ID NO: 44944 - DNA, 22 bp, Artificial Sequence
  Synthetic: FXN 3 reverse 9:69045681-69045706; SpCas9
accaggccttgctcttgttaat

SEQ ID NO: 44945 - DNA, 21 bp, Artificial Sequence
  Synthetic: FXN 3 reverse 9:69045682-69045706; SpCas9
ccaggccttgctcttgttaat

SEQ ID NO: 44946 - DNA, 20 bp, Artificial Sequence
  Synthetic: FXN 3 reverse 9:69045683-69045706; SpCas9
caggccttgctcttgttaat

SEQ ID NO: 44947 - DNA, 19 bp, Artificial Sequence
  Synthetic: FXN 3 reverse 9:69045684-69045706; SpCas9
aggccttgctcttgttaat

SEQ ID NO: 44948 - DNA, 18 bp, Artificial Sequence
  Synthetic: FXN 3 reverse 9:69045685-69045706; SpCas9
ggccttgctcttgttaat

SEQ ID NO: 44949 - DNA, 25 bp, Artificial Sequence
  Synthetic: FXN 3 forward 9:69045686-69045714; SpCas9
caagagcaaggcctggtaccaaaaa

SEQ ID NO: 44950 - DNA, 24 bp, Artificial Sequence
  Synthetic: FXN 3 forward 9:69045687-69045714; SpCas9
aagagcaaggcctggtaccaaaaa

SEQ ID NO: 44951 - DNA, 23 bp, Artificial Sequence
  Synthetic: FXN 3 forward 9:69045688-69045714; SpCas9
agagcaaggcctggtaccaaaaa

SEQ ID NO: 44952 - DNA, 22 bp, Artificial Sequence
  Synthetic: FXN 3 forward 9:69045689-69045714; SpCas9
gagcaaggcctggtaccaaaaa

SEQ ID NO: 44953 - DNA, 21 bp, Artificial Sequence
  Synthetic: FXN 3 forward 9:69045690-69045714; SpCas9
agcaaggcctggtaccaaaaa

SEQ ID NO: 44954 - DNA, 20 bp, Artificial Sequence
  Synthetic: FXN 3 forward 9:69045691-69045714; SpCas9
gcaaggcctggtaccaaaaa

SEQ ID NO: 44955 - DNA, 19 bp, Artificial Sequence
  Synthetic: FXN 3 forward 9:69045692-69045714; SpCas9
caaggcctggtaccaaaaa

SEQ ID NO: 44956 - DNA, 18 bp, Artificial Sequence
  Synthetic: FXN 3 forward 9:69045693-69045714; SpCas9
aaggcctggtaccaaaaa

SEQ ID NO: 44957 - DNA, 25 bp, Artificial Sequence
  Synthetic: FXN 3 reverse 9:69045697-69045725; SpCas9
gagtaaattcactttttttggtacc

SEQ ID NO: 44958 - DNA, 24 bp, Artificial Sequence
  Synthetic: FXN 3 reverse 9:69045698-69045725; SpCas9
agtaaattcactttttttggtacc

SEQ ID NO: 44959 - DNA, 23 bp, Artificial Sequence
  Synthetic: FXN 3 reverse 9:69045699-69045725; SpCas9
gtaaattcactttttttggtacc

SEQ ID NO: 44960 - DNA, 22 bp, Artificial Sequence
  Synthetic: FXN 3 reverse 9:69045700-69045725; SpCas9
taaattcactttttttggtacc

SEQ ID NO: 44961 - DNA, 21 bp, Artificial Sequence
  Synthetic: FXN 3 reverse 9:69045701-69045725; SpCas9
aaattcactttttttggtacc

SEQ ID NO: 44962 - DNA, 20 bp, Artificial Sequence
  Synthetic: FXN 3 reverse 9:69045702-69045725; SpCas9
aattcactttttttggtacc

SEQ ID NO: 44963 - DNA, 19 bp, Artificial Sequence
  Synthetic: FXN 3 reverse 9:69045703-69045725; SpCas9
attcactttttttggtacc

SEQ ID NO: 44964 - DNA, 18 bp, Artificial Sequence
  Synthetic: FXN 3 reverse 9:69045704-69045725; SpCas9
ttcactttttttggtacc

SEQ ID NO: 44965 - DNA, 25 bp, Artificial Sequence
  Synthetic: FXN 3 reverse 9:69045698-69045726; SpCas9
ggagtaaattcactttttttggtac

SEQ ID NO: 44966 - DNA, 24 bp, Artificial Sequence
  Synthetic: FXN 3 reverse 9:69045699-69045726; SpCas9
gagtaaattcactttttttggtac

SEQ ID NO: 44967 - DNA, 23 bp, Artificial Sequence
  Synthetic: FXN 3 reverse 9:69045700-69045726; SpCas9
agtaaattcactttttttggtac

SEQ ID NO: 44968 - DNA, 22 bp, Artificial Sequence
  Synthetic: FXN 3 reverse 9:69045701-69045726; SpCas9
gtaaattcactttttttggtac

SEQ ID NO: 44969 - DNA, 21 bp, Artificial Sequence
  Synthetic: FXN 3 reverse 9:69045702-69045726; SpCas9
taaattcactttttttggtac

SEQ ID NO: 44970 - DNA, 20 bp, Artificial Sequence
  Synthetic: FXN 3 reverse 9:69045703-69045726; SpCas9
aaattcactttttttggtac

SEQ ID NO: 44971 - DNA, 19 bp, Artificial Sequence
  Synthetic: FXN 3 reverse 9:69045704-69045726; SpCas9
aattcactttttttggtac

SEQ ID NO: 44972 - DNA, 18 bp, Artificial Sequence
  Synthetic: FXN 3 reverse 9:69045705-69045726; SpCas9
attcactttttttggtac

SEQ ID NO: 44973 - DNA, 25 bp, Artificial Sequence
  Synthetic: FXN 3 reverse 9:69045704-69045732; SpCas9
agtttcggagtaaattcactttttt

SEQ ID NO: 44974 - DNA, 24 bp, Artificial Sequence
  Synthetic: FXN 3 reverse 9:69045705-69045732; SpCas9
gtttcggagtaaattcactttttt

SEQ ID NO: 44975 - DNA, 23 bp, Artificial Sequence
  Synthetic: FXN 3 reverse 9:69045706-69045732; SpCas9
tttcggagtaaattcactttttt

SEQ ID NO: 44976 - DNA, 22 bp, Artificial Sequence
  Synthetic: FXN 3 reverse 9:69045707-69045732; SpCas9
ttcggagtaaattcactttttt

SEQ ID NO: 44977 - DNA, 21 bp, Artificial Sequence
  Synthetic: FXN 3 reverse 9:69045708-69045732; SpCas9
tcggagtaaattcactttttt

SEQ ID NO: 44978 - DNA, 20 bp, Artificial Sequence
  Synthetic: FXN 3 reverse 9:69045709-69045732; SpCas9
cggagtaaattcactttttt

SEQ ID NO: 44979 - DNA, 19 bp, Artificial Sequence
  Synthetic: FXN 3 reverse 9:69045710-69045732; SpCas9
ggagtaaattcactttttt

SEQ ID NO: 44980 - DNA, 18 bp, Artificial Sequence
  Synthetic: FXN 3 reverse 9:69045711-69045732; SpCas9
gagtaaattcactttttt

SEQ ID NO: 44981 - DNA, 25 bp, Artificial Sequence
  Synthetic: FXN 3 forward 9:69045706-69045734; SpCas9
aaaaaaagtgaatttactccgaaac

SEQ ID NO: 44982 - DNA, 24 bp, Artificial Sequence
  Synthetic: FXN 3 forward 9:69045707-69045734; SpCas9
aaaaaagtgaatttactccgaaac

SEQ ID NO: 44983 - DNA, 23 bp, Artificial Sequence
  Synthetic: FXN 3 forward 9:69045708-69045734; SpCas9
aaaaagtgaatttactccgaaac

SEQ ID NO: 44984 - DNA, 22 bp, Artificial Sequence
  Synthetic: FXN 3 forward 9:69045709-69045734; SpCas9
aaaagtgaatttactccgaaac

SEQ ID NO: 44985 - DNA, 21 bp, Artificial Sequence
  Synthetic: FXN 3 forward 9:69045710-69045734; SpCas9
aaagtgaatttactccgaaac

SEQ ID NO: 44986 - DNA, 20 bp, Artificial Sequence
  Synthetic: FXN 3 forward 9:69045711-69045734; SpCas9
aagtgaatttactccgaaac

SEQ ID NO: 44987 - DNA, 19 bp, Artificial Sequence
  Synthetic: FXN 3 forward 9:69045712-69045734; SpCas9
agtgaatttactccgaaac

SEQ ID NO: 44988 - DNA, 18 bp, Artificial Sequence
  Synthetic: FXN 3 forward 9:69045713-69045734; SpCas9
gtgaatttactccgaaac

SEQ ID NO: 44989 - DNA, 25 bp, Artificial Sequence
  Synthetic: FXN 3 forward 9:69045711-69045739; SpCas9
aagtgaatttactccgaaactagct

SEQ ID NO: 44990 - DNA, 24 bp, Artificial Sequence
  Synthetic: FXN 3 forward 9:69045712-69045739; SpCas9
agtgaatttactccgaaactagct

SEQ ID NO: 44991 - DNA, 23 bp, Artificial Sequence
  Synthetic: FXN 3 forward 9:69045713-69045739; SpCas9
gtgaatttactccgaaactagct

SEQ ID NO: 44992 - DNA, 22 bp, Artificial Sequence
  Synthetic: FXN 3 forward 9:69045714-69045739; SpCas9
tgaatttactccgaaactagct

SEQ ID NO: 44993 - DNA, 21 bp, Artificial Sequence
  Synthetic: FXN 3 forward 9:69045715-69045739; SpCas9
gaatttactccgaaactagct

SEQ ID NO: 44994 - DNA, 20 bp, Artificial Sequence
  Synthetic: FXN 3 forward 9:69045716-69045739; SpCas9
aatttactccgaaactagct

SEQ ID NO: 44995 - DNA, 19 bp, Artificial Sequence
  Synthetic: FXN 3 forward 9:69045717-69045739; SpCas9
atttactccgaaactagct

SEQ ID NO: 44996 - DNA, 18 bp, Artificial Sequence
  Synthetic: FXN 3 forward 9:69045718-69045739; SpCas9
tttactccgaaactagct

SEQ ID NO: 44997 - DNA, 25 bp, Artificial Sequence
  Synthetic: FXN 3 forward 9:69045712-69045740; SpCas9
agtgaatttactccgaaactagctt

SEQ ID NO: 44998 - DNA, 24 bp, Artificial Sequence
  Synthetic: FXN 3 forward 9:69045713-69045740; SpCas9
gtgaatttactccgaaactagctt

SEQ ID NO: 44999 - DNA, 23 bp, Artificial Sequence
  Synthetic: FXN 3 forward 9:69045714-69045740; SpCas9
tgaatttactccgaaactagctt

SEQ ID NO: 45000 - DNA, 22 bp, Artificial Sequence
  Synthetic: FXN 3 forward 9:69045715-69045740; SpCas9
gaatttactccgaaactagctt

SEQ ID NO: 45001 - DNA, 21 bp, Artificial Sequence
  Synthetic: FXN 3 forward 9:69045716-69045740; SpCas9
aatttactccgaaactagctt

SEQ ID NO: 45002 - DNA, 20 bp, Artificial Sequence
  Synthetic: FXN 3 forward 9:69045717-69045740; SpCas9
atttactccgaaactagctt

SEQ ID NO: 45003 - DNA, 19 bp, Artificial Sequence
  Synthetic: FXN 3 forward 9:69045718-69045740; SpCas9
tttactccgaaactagctt

SEQ ID NO: 45004 - DNA, 18 bp, Artificial Sequence
  Synthetic: FXN 3 forward 9:69045719-69045740; SpCas9
ttactccgaaactagctt

SEQ ID NO: 45005 - DNA, 25 bp, Artificial Sequence
  Synthetic: FXN 3 forward 9:69045716-69045744; SpCas9
aatttactccgaaactagcttgggt

SEQ ID NO: 45006 - DNA, 24 bp, Artificial Sequence
  Synthetic: FXN 3 forward 9:69045717-69045744; SpCas9
atttactccgaaactagcttgggt

SEQ ID NO: 45007 - DNA, 23 bp, Artificial Sequence
  Synthetic: FXN 3 forward 9:69045718-69045744; SpCas9
tttactccgaaactagcttgggt

SEQ ID NO: 45008 - DNA, 22 bp, Artificial Sequence
  Synthetic: FXN 3 forward 9:69045719-69045744; SpCas9
ttactccgaaactagcttgggt

SEQ ID NO: 45009 - DNA, 21 bp, Artificial Sequence
  Synthetic: FXN 3 forward 9:69045720-69045744; SpCas9
tactccgaaactagcttgggt

SEQ ID NO: 45010 - DNA, 20 bp, Artificial Sequence
  Synthetic: FXN 3 forward 9:69045721-69045744; SpCas9
actccgaaactagcttgggt

SEQ ID NO: 45011 - DNA, 19 bp, Artificial Sequence
  Synthetic: FXN 3 forward 9:69045722-69045744; SpCas9
ctccgaaactagcttgggt

SEQ ID NO: 45012 - DNA, 18 bp, Artificial Sequence
  Synthetic: FXN 3 forward 9:69045723-69045744; SpCas9
tccgaaactagcttgggt

SEQ ID NO: 45013 - DNA, 25 bp, Artificial Sequence
  Synthetic: FXN 3 forward 9:69045717-69045745; SpCas9
atttactccgaaactagcttgggtg

SEQ ID NO: 45014 - DNA, 24 bp, Artificial Sequence
  Synthetic: FXN 3 forward 9:69045718-69045745; SpCas9
tttactccgaaactagcttgggtg

SEQ ID NO: 45015 - DNA, 23 bp, Artificial Sequence
  Synthetic: FXN 3 forward 9:69045719-69045745; SpCas9
ttactccgaaactagcttgggtg

SEQ ID NO: 45016 - DNA, 22 bp, Artificial Sequence
  Synthetic: FXN 3 forward 9:69045720-69045745; SpCas9
tactccgaaactagcttgggtg

SEQ ID NO: 45017 - DNA, 21 bp, Artificial Sequence
  Synthetic: FXN 3 forward 9:69045721-69045745; SpCas9
actccgaaactagcttgggtg

SEQ ID NO: 45018 - DNA, 20 bp, Artificial Sequence
  Synthetic: FXN 3 forward 9:69045722-69045745; SpCas9
ctccgaaactagcttgggtg

SEQ ID NO: 45019 - DNA, 19 bp, Artificial Sequence
  Synthetic: FXN 3 forward 9:69045723-69045745; SpCas9
tccgaaactagcttgggtg

SEQ ID NO: 45020 - DNA, 18 bp, Artificial Sequence
  Synthetic: FXN 3 forward 9:69045724-69045745; SpCas9
ccgaaactagcttgggtg

SEQ ID NO: 45021 - DNA, 25 bp, Artificial Sequence
  Synthetic: FXN 3 forward 9:69045718-69045746; SpCas9
tttactccgaaactagcttgggtga

SEQ ID NO: 45022 - DNA, 24 bp, Artificial Sequence
  Synthetic: FXN 3 forward 9:69045719-69045746; SpCas9
ttactccgaaactagcttgggtga

SEQ ID NO: 45023 - DNA, 23 bp, Artificial Sequence
  Synthetic: FXN 3 forward 9:69045720-69045746; SpCas9
tactccgaaactagcttgggtga

SEQ ID NO: 45024 - DNA, 22 bp, Artificial Sequence
  Synthetic: FXN 3 forward 9:69045721-69045746; SpCas9
actccgaaactagcttgggtga

SEQ ID NO: 45025 - DNA, 21 bp, Artificial Sequence
  Synthetic: FXN 3 forward 9:69045722-69045746; SpCas9
ctccgaaactagcttgggtga

SEQ ID NO: 45026 - DNA, 20 bp, Artificial Sequence
  Synthetic: FXN 3 forward 9:69045723-69045746; SpCas9
tccgaaactagcttgggtga

SEQ ID NO: 45027 - DNA, 19 bp, Artificial Sequence
  Synthetic: FXN 3 forward 9:69045724-69045746; SpCas9
ccgaaactagcttgggtga

SEQ ID NO: 45028 - DNA, 18 bp, Artificial Sequence
  Synthetic: FXN 3 forward 9:69045725-69045746; SpCas9
cgaaactagcttgggtga

SEQ ID NO: 45029 - DNA, 25 bp, Artificial Sequence
  Synthetic: FXN 3 forward 9:69045719-69045747; SpCas9
ttactccgaaactagcttgggtgag

SEQ ID NO: 45030 - DNA, 24 bp, Artificial Sequence
  Synthetic: FXN 3 forward 9:69045720-69045747; SpCas9
tactccgaaactagcttgggtgag

SEQ ID NO: 45031 - DNA, 23 bp, Artificial Sequence
  Synthetic: FXN 3 forward 9:69045721-69045747; SpCas9
actccgaaactagcttgggtgag

SEQ ID NO: 45032 - DNA, 22 bp, Artificial Sequence
  Synthetic: FXN 3 forward 9:69045722-69045747; SpCas9
ctccgaaactagcttgggtgag

SEQ ID NO: 45033 - DNA, 21 bp, Artificial Sequence
  Synthetic: FXN 3 forward 9:69045723-69045747; SpCas9
tccgaaactagcttgggtgag

SEQ ID NO: 45034 - DNA, 20 bp, Artificial Sequence
  Synthetic: FXN 3 forward 9:69045724-69045747; SpCas9
ccgaaactagcttgggtgag

SEQ ID NO: 45035 - DNA, 19 bp, Artificial Sequence
  Synthetic: FXN 3 forward 9:69045725-69045747; SpCas9
cgaaactagcttgggtgag

SEQ ID NO: 45036 - DNA, 18 bp, Artificial Sequence
  Synthetic: FXN 3 forward 9:69045726-69045747; SpCas9
gaaactagcttgggtgag

SEQ ID NO: 45037 - DNA, 25 bp, Artificial Sequence
  Synthetic: FXN 3 reverse 9:69045722-69045750; SpCas9
gtacccctcacccaagctagtttcg

SEQ ID NO: 45038 - DNA, 24 bp, Artificial Sequence
  Synthetic: FXN 3 reverse 9:69045723-69045750; SpCas9
tacccctcacccaagctagtttcg

SEQ ID NO: 45039 - DNA, 23 bp, Artificial Sequence
  Synthetic: FXN 3 reverse 9:69045724-69045750; SpCas9
acccctcacccaagctagtttcg

SEQ ID NO: 45040 - DNA, 22 bp, Artificial Sequence
  Synthetic: FXN 3 reverse 9:69045725-69045750; SpCas9
cccctcacccaagctagtttcg

SEQ ID NO: 45041 - DNA, 21 bp, Artificial Sequence
  Synthetic: FXN 3 reverse 9:69045726-69045750; SpCas9
ccctcacccaagctagtttcg

SEQ ID NO: 45042 - DNA, 20 bp, Artificial Sequence
  Synthetic: FXN 3 reverse 9:69045727-69045750; SpCas9
cctcacccaagctagtttcg

SEQ ID NO: 45043 - DNA, 19 bp, Artificial Sequence
  Synthetic: FXN 3 reverse 9:69045728-69045750; SpCas9
ctcacccaagctagtttcg

SEQ ID NO: 45044 - DNA, 18 bp, Artificial Sequence
  Synthetic: FXN 3 reverse 9:69045729-69045750; SpCas9
tcacccaagctagtttcg

SEQ ID NO: 45045 - DNA, 25 bp, Artificial Sequence
  Synthetic: FXN 3 reverse 9:69045724-69045752; SpCas9
ttgtacccctcacccaagctagttt

SEQ ID NO: 45046 - DNA, 24 bp, Artificial Sequence
  Synthetic: FXN 3 reverse 9:69045725-69045752; SpCas9
tgtacccctcacccaagctagttt

SEQ ID NO: 45047 - DNA, 23 bp, Artificial Sequence
  Synthetic: FXN 3 reverse 9:69045726-69045752; SpCas9
gtacccctcacccaagctagttt

SEQ ID NO: 45048 - DNA, 22 bp, Artificial Sequence
  Synthetic: FXN 3 reverse 9:69045727-69045752; SpCas9
tacccctcacccaagctagttt

SEQ ID NO: 45049 - DNA, 21 bp, Artificial Sequence
  Synthetic: FXN 3 reverse 9:69045728-69045752; SpCas9
acccctcacccaagctagttt

SEQ ID NO: 45050 - DNA, 20 bp, Artificial Sequence
  Synthetic: FXN 3 reverse 9:69045729-69045752; SpCas9
cccctcacccaagctagttt

SEQ ID NO: 45051 - DNA, 19 bp, Artificial Sequence
  Synthetic: FXN 3 reverse 9:69045730-69045752; SpCas9
ccctcacccaagctagttt

SEQ ID NO: 45052 - DNA, 18 bp, Artificial Sequence
  Synthetic: FXN 3 reverse 9:69045731-69045752; SpCas9
cctcacccaagctagttt

SEQ ID NO: 45053 - DNA, 25 bp, Artificial Sequence
  Synthetic: FXN 3 forward 9:69045726-69045754; SpCas9
gaaactagcttgggtgaggggtaca

SEQ ID NO: 45054 - DNA, 24 bp, Artificial Sequence
  Synthetic: FXN 3 forward 9:69045727-69045754; SpCas9
aaactagcttgggtgaggggtaca

SEQ ID NO: 45055 - DNA, 23 bp, Artificial Sequence
  Synthetic: FXN 3 forward 9:69045728-69045754; SpCas9
aactagcttgggtgaggggtaca

SEQ ID NO: 45056 - DNA, 22 bp, Artificial Sequence
  Synthetic: FXN 3 forward 9:69045729-69045754; SpCas9
actagcttgggtgaggggtaca

SEQ ID NO: 45057 - DNA, 21 bp, Artificial Sequence
  Synthetic: FXN 3 forward 9:69045730-69045754; SpCas9
ctagcttgggtgaggggtaca

SEQ ID NO: 45058 - DNA, 20 bp, Artificial Sequence
  Synthetic: FXN 3 forward 9:69045731-69045754; SpCas9
tagcttgggtgaggggtaca

SEQ ID NO: 45059 - DNA, 19 bp, Artificial Sequence
  Synthetic: FXN 3 forward 9:69045732-69045754; SpCas9
agcttgggtgaggggtaca

SEQ ID NO: 45060 - DNA, 18 bp, Artificial Sequence
  Synthetic: FXN 3 forward 9:69045733-69045754; SpCas9
gcttgggtgaggggtaca

SEQ ID NO: 45061 - DNA, 25 bp, Artificial Sequence
  Synthetic: FXN 3 reverse 9:69045730-69045758; SpCas9
gatgctttgtacccctcacccaagc

SEQ ID NO: 45062 - DNA, 24 bp, Artificial Sequence
  Synthetic: FXN 3 reverse 9:69045731-69045758; SpCas9
atgctttgtacccctcacccaagc

SEQ ID NO: 45063 - DNA, 23 bp, Artificial Sequence
  Synthetic: FXN 3 reverse 9:69045732-69045758; SpCas9
tgctttgtacccctcacccaagc

SEQ ID NO: 45064 - DNA, 22 bp, Artificial Sequence
  Synthetic: FXN 3 reverse 9:69045733-69045758; SpCas9
gctttgtacccctcacccaagc

SEQ ID NO: 45065 - DNA, 21 bp, Artificial Sequence
  Synthetic: FXN 3 reverse 9:69045734-69045758; SpCas9
ctttgtacccctcacccaagc

SEQ ID NO: 45066 - DNA, 20 bp, Artificial Sequence
  Synthetic: FXN 3 reverse 9:69045735-69045758; SpCas9
tttgtacccctcacccaagc

SEQ ID NO: 45067 - DNA, 19 bp, Artificial Sequence
  Synthetic: FXN 3 reverse 9:69045736-69045758; SpCas9
ttgtacccctcacccaagc

SEQ ID NO: 45068 - DNA, 18 bp, Artificial Sequence
  Synthetic: FXN 3 reverse 9:69045737-69045758; SpCas9
tgtacccctcacccaagc

SEQ ID NO: 45069 - DNA, 25 bp, Artificial Sequence
  Synthetic: FXN 3 reverse 9:69045734-69045762; SpCas9
gcaggatgctttgtacccctcaccc

SEQ ID NO: 45070 - DNA, 24 bp, Artificial Sequence
  Synthetic: FXN 3 reverse 9:69045735-69045762; SpCas9
caggatgctttgtacccctcaccc

SEQ ID NO: 45071 - DNA, 23 bp, Artificial Sequence
  Synthetic: FXN 3 reverse 9:69045736-69045762; SpCas9
aggatgctttgtacccctcaccc

SEQ ID NO: 45072 - DNA, 22 bp, Artificial Sequence
  Synthetic: FXN 3 reverse 9:69045737-69045762; SpCas9
ggatgctttgtacccctcaccc

SEQ ID NO: 45073 - DNA, 21 bp, Artificial Sequence
  Synthetic: FXN 3 reverse 9:69045738-69045762; SpCas9
gatgctttgtacccctcaccc

SEQ ID NO: 45074 - DNA, 20 bp, Artificial Sequence
  Synthetic: FXN 3 reverse 9:69045739-69045762; SpCas9
atgctttgtacccctcaccc

SEQ ID NO: 45075 - DNA, 19 bp, Artificial Sequence
  Synthetic: FXN 3 reverse 9:69045740-69045762; SpCas9
tgctttgtacccctcaccc

SEQ ID NO: 45076 - DNA, 18 bp, Artificial Sequence
  Synthetic: FXN 3 reverse 9:69045741-69045762; SpCas9
gctttgtacccctcaccc

SEQ ID NO: 45077 - DNA, 25 bp, Artificial Sequence
  Synthetic: FXN 3 forward 9:69045747-69045775; SpCas9
tacaaagcatcctgcctttctttaa

SEQ ID NO: 45078 - DNA, 24 bp, Artificial Sequence
  Synthetic: FXN 3 forward 9:69045748-69045775; SpCas9
acaaagcatcctgcctttctttaa

SEQ ID NO: 45079 - DNA, 23 bp, Artificial Sequence
  Synthetic: FXN 3 forward 9:69045749-69045775; SpCas9
caaagcatcctgcctttctttaa

SEQ ID NO: 45080 - DNA, 22 bp, Artificial Sequence
  Synthetic: FXN 3 forward 9:69045750-69045775; SpCas9
aaagcatcctgcctttctttaa

SEQ ID NO: 45081 - DNA, 21 bp, Artificial Sequence
  Synthetic: FXN 3 forward 9:69045751-69045775; SpCas9
aagcatcctgcctttctttaa

SEQ ID NO: 45082 - DNA, 20 bp, Artificial Sequence
  Synthetic: FXN 3 forward 9:69045752-69045775; SpCas9
agcatcctgcctttctttaa

SEQ ID NO: 45083 - DNA, 19 bp, Artificial Sequence
  Synthetic: FXN 3 forward 9:69045753-69045775; SpCas9
gcatcctgcctttctttaa

SEQ ID NO: 45084 - DNA, 18 bp, Artificial Sequence
  Synthetic: FXN 3 forward 9:69045754-69045775; SpCas9
catcctgcctttctttaa

SEQ ID NO: 45085 - DNA, 25 bp, Artificial Sequence
  Synthetic: FXN 3 reverse 9:69045757-69045785; SpCas9
ggaagcagcacttttaaagaaaggc

SEQ ID NO: 45086 - DNA, 24 bp, Artificial Sequence
  Synthetic: FXN 3 reverse 9:69045758-69045785; SpCas9
gaagcagcacttttaaagaaaggc

SEQ ID NO: 45087 - DNA, 23 bp, Artificial Sequence
  Synthetic: FXN 3 reverse 9:69045759-69045785; SpCas9
aagcagcacttttaaagaaaggc

SEQ ID NO: 45088 - DNA, 22 bp, Artificial Sequence
  Synthetic: FXN 3 reverse 9:69045760-69045785; SpCas9
agcagcacttttaaagaaaggc

SEQ ID NO: 45089 - DNA, 21 bp, Artificial Sequence
  Synthetic: FXN 3 reverse 9:69045761-69045785; SpCas9
gcagcacttttaaagaaaggc

SEQ ID NO: 45090 - DNA, 20 bp, Artificial Sequence
  Synthetic: FXN 3 reverse 9:69045762-69045785; SpCas9
cagcacttttaaagaaaggc

SEQ ID NO: 45091 - DNA, 19 bp, Artificial Sequence
  Synthetic: FXN 3 reverse 9:69045763-69045785; SpCas9
agcacttttaaagaaaggc

SEQ ID NO: 45092 - DNA, 18 bp, Artificial Sequence
  Synthetic: FXN 3 reverse 9:69045764-69045785; SpCas9
gcacttttaaagaaaggc

SEQ ID NO: 45093 - DNA, 25 bp, Artificial Sequence
  Synthetic: FXN 3 reverse 9:69045758-69045786; SpCas9
gggaagcagcacttttaaagaaagg

SEQ ID NO: 45094 - DNA, 24 bp, Artificial Sequence
  Synthetic: FXN 3 reverse 9:69045759-69045786; SpCas9
ggaagcagcacttttaaagaaagg

SEQ ID NO: 45095 - DNA, 23 bp, Artificial Sequence
  Synthetic: FXN 3 reverse 9:69045760-69045786; SpCas9
gaagcagcacttttaaagaaagg

SEQ ID NO: 45096 - DNA, 22 bp, Artificial Sequence
  Synthetic: FXN 3 reverse 9:69045761-69045786; SpCas9
aagcagcacttttaaagaaagg

SEQ ID NO: 45097 - DNA, 21 bp, Artificial Sequence
  Synthetic: FXN 3 reverse 9:69045762-69045786; SpCas9
agcagcacttttaaagaaagg

SEQ ID NO: 45098 - DNA, 20 bp, Artificial Sequence
  Synthetic: FXN 3 reverse 9:69045763-69045786; SpCas9
gcagcacttttaaagaaagg

SEQ ID NO: 45099 - DNA, 19 bp, Artificial Sequence
  Synthetic: FXN 3 reverse 9:69045764-69045786; SpCas9
cagcacttttaaagaaagg

SEQ ID NO: 45100 - DNA, 18 bp, Artificial Sequence
  Synthetic: FXN 3 reverse 9:69045765-69045786; SpCas9
agcacttttaaagaaagg

SEQ ID NO: 45101 - DNA, 25 bp, Artificial Sequence
  Synthetic: FXN 3 reverse 9:69045761-69045789; SpCas9
aaggggaagcagcacttttaaagaa

SEQ ID NO: 45102 - DNA, 24 bp, Artificial Sequence
  Synthetic: FXN 3 reverse 9:69045762-69045789; SpCas9
aggggaagcagcacttttaaagaa

SEQ ID NO: 45103 - DNA, 23 bp, Artificial Sequence
  Synthetic: FXN 3 reverse 9:69045763-69045789; SpCas9
ggggaagcagcacttttaaagaa

SEQ ID NO: 45104 - DNA, 22 bp, Artificial Sequence
  Synthetic: FXN 3 reverse 9:69045764-69045789; SpCas9
gggaagcagcacttttaaagaa

SEQ ID NO: 45105 - DNA, 21 bp, Artificial Sequence
  Synthetic: FXN 3 reverse 9:69045765-69045789; SpCas9
ggaagcagcacttttaaagaa

SEQ ID NO: 45106 - DNA, 20 bp, Artificial Sequence
  Synthetic: FXN 3 reverse 9:69045766-69045789; SpCas9
gaagcagcacttttaaagaa

SEQ ID NO: 45107 - DNA, 19 bp, Artificial Sequence
  Synthetic: FXN 3 reverse 9:69045767-69045789; SpCas9
aagcagcacttttaaagaa

SEQ ID NO: 45108 - DNA, 18 bp, Artificial Sequence
  Synthetic: FXN 3 reverse 9:69045768-69045789; SpCas9
agcagcacttttaaagaa

SEQ ID NO: 45109 - DNA, 25 bp, Artificial Sequence
  Synthetic: FXN 3 reverse 9:69045762-69045790; SpCas9
caaggggaagcagcacttttaaaga

SEQ ID NO: 45110 - DNA, 24 bp, Artificial Sequence
  Synthetic: FXN 3 reverse 9:69045763-69045790; SpCas9
aaggggaagcagcacttttaaaga

SEQ ID NO: 45111 - DNA, 23 bp, Artificial Sequence
  Synthetic: FXN 3 reverse 9:69045764-69045790; SpCas9
aggggaagcagcacttttaaaga

SEQ ID NO: 45112 - DNA, 22 bp, Artificial Sequence
  Synthetic: FXN 3 reverse 9:69045765-69045790; SpCas9
ggggaagcagcacttttaaaga

SEQ ID NO: 45113 - DNA, 21 bp, Artificial Sequence
  Synthetic: FXN 3 reverse 9:69045766-69045790; SpCas9
gggaagcagcacttttaaaga

SEQ ID NO: 45114 - DNA, 20 bp, Artificial Sequence
  Synthetic: FXN 3 reverse 9:69045767-69045790; SpCas9
ggaagcagcacttttaaaga

SEQ ID NO: 45115 - DNA, 19 bp, Artificial Sequence
  Synthetic: FXN 3 reverse 9:69045768-69045790; SpCas9
gaagcagcacttttaaaga

SEQ ID NO: 45116 - DNA, 18 bp, Artificial Sequence
  Synthetic: FXN 3 reverse 9:69045769-69045790; SpCas9
aagcagcacttttaaaga

SEQ ID NO: 45117 - DNA, 25 bp, Artificial Sequence
  Synthetic: FXN 3 forward 9:69045763-69045791; SpCas9
tttctttaaaagtgctgcttcccct

SEQ ID NO: 45118 - DNA, 24 bp, Artificial Sequence
  Synthetic: FXN 3 forward 9:69045764-69045791; SpCas9
ttctttaaaagtgctgcttcccct

SEQ ID NO: 45119 - DNA, 23 bp, Artificial Sequence
  Synthetic: FXN 3 forward 9:69045765-69045791; SpCas9
tctttaaaagtgctgcttcccct

SEQ ID NO: 45120 - DNA, 22 bp, Artificial Sequence
  Synthetic: FXN 3 forward 9:69045766-69045791; SpCas9
ctttaaaagtgctgcttcccct

SEQ ID NO: 45121 - DNA, 21 bp, Artificial Sequence
  Synthetic: FXN 3 forward 9:69045767-69045791; SpCas9
tttaaaagtgctgcttcccct

SEQ ID NO: 45122 - DNA, 20 bp, Artificial Sequence
  Synthetic: FXN 3 forward 9:69045768-69045791; SpCas9
ttaaaagtgctgcttcccct

SEQ ID NO: 45123 - DNA, 19 bp, Artificial Sequence
  Synthetic: FXN 3 forward 9:69045769-69045791; SpCas9
taaaagtgctgcttcccct

SEQ ID NO: 45124 - DNA, 18 bp, Artificial Sequence
  Synthetic: FXN 3 forward 9:69045770-69045791; SpCas9
aaaagtgctgcttcccct

SEQ ID NO: 45125 - DNA, 25 bp, Artificial Sequence
  Synthetic: FXN 3 forward 9:69045766-69045794; SpCas9
ctttaaaagtgctgcttccccttgg

SEQ ID NO: 45126 - DNA, 24 bp, Artificial Sequence
  Synthetic: FXN 3 forward 9:69045767-69045794; SpCas9
tttaaaagtgctgcttccccttgg

SEQ ID NO: 45127 - DNA, 23 bp, Artificial Sequence
  Synthetic: FXN 3 forward 9:69045768-69045794; SpCas9
ttaaaagtgctgcttccccttgg

SEQ ID NO: 45128 - DNA, 22 bp, Artificial Sequence
  Synthetic: FXN 3 forward 9:69045769-69045794; SpCas9
taaaagtgctgcttccccttgg

SEQ ID NO: 45129 - DNA, 21 bp, Artificial Sequence
  Synthetic: FXN 3 forward 9:69045770-69045794; SpCas9
aaaagtgctgcttccccttgg

SEQ ID NO: 45130 - DNA, 20 bp, Artificial Sequence
  Synthetic: FXN 3 forward 9:69045771-69045794; SpCas9
aaagtgctgcttccccttgg

SEQ ID NO: 45131 - DNA, 19 bp, Artificial Sequence
  Synthetic: FXN 3 forward 9:69045772-69045794; SpCas9
aagtgctgcttccccttgg

SEQ ID NO: 45132 - DNA, 18 bp, Artificial Sequence
  Synthetic: FXN 3 forward 9:69045773-69045794; SpCas9
agtgctgcttccccttgg

SEQ ID NO: 45133 - DNA, 25 bp, Artificial Sequence
  Synthetic: FXN 3 reverse 9:69045766-69045794; SpCas9
cttccaaggggaagcagcactttta

SEQ ID NO: 45134 - DNA, 24 bp, Artificial Sequence
  Synthetic: FXN 3 reverse 9:69045767-69045794; SpCas9
ttccaaggggaagcagcactttta

SEQ ID NO: 45135 - DNA, 23 bp, Artificial Sequence
  Synthetic: FXN 3 reverse 9:69045768-69045794; SpCas9
tccaaggggaagcagcactttta

SEQ ID NO: 45136 - DNA, 22 bp, Artificial Sequence
  Synthetic: FXN 3 reverse 9:69045769-69045794; SpCas9
ccaaggggaagcagcactttta

SEQ ID NO: 45137 - DNA, 21 bp, Artificial Sequence
  Synthetic: FXN 3 reverse 9:69045770-69045794; SpCas9
caaggggaagcagcactttta

SEQ ID NO: 45138 - DNA, 20 bp, Artificial Sequence
  Synthetic: FXN 3 reverse 9:69045771-69045794; SpCas9
aaggggaagcagcactttta

SEQ ID NO: 45139 - DNA, 19 bp, Artificial Sequence
  Synthetic: FXN 3 reverse 9:69045772-69045794; SpCas9
aggggaagcagcactttta

SEQ ID NO: 45140 - DNA, 18 bp, Artificial Sequence
  Synthetic: FXN 3 reverse 9:69045773-69045794; SpCas9
ggggaagcagcactttta

SEQ ID NO: 45141 - DNA, 25 bp, Artificial Sequence
  Synthetic: FXN 3 forward 9:69045769-69045797; SpCas9
taaaagtgctgcttccccttggaag

SEQ ID NO: 45142 - DNA, 24 bp, Artificial Sequence
  Synthetic: FXN 3 forward 9:69045770-69045797; SpCas9
aaaagtgctgcttccccttggaag

SEQ ID NO: 45143 - DNA, 23 bp, Artificial Sequence
  Synthetic: FXN 3 forward 9:69045771-69045797; SpCas9
aaagtgctgcttccccttggaag

SEQ ID NO: 45144 - DNA, 22 bp, Artificial Sequence
  Synthetic: FXN 3 forward 9:69045772-69045797; SpCas9
aagtgctgcttccccttggaag

SEQ ID NO: 45145 - DNA, 21 bp, Artificial Sequence
  Synthetic: FXN 3 forward 9:69045773-69045797; SpCas9
agtgctgcttccccttggaag

SEQ ID NO: 45146 - DNA, 20 bp, Artificial Sequence
  Synthetic: FXN 3 forward 9:69045774-69045797; SpCas9
gtgctgcttccccttggaag

SEQ ID NO: 45147 - DNA, 19 bp, Artificial Sequence
  Synthetic: FXN 3 forward 9:69045775-69045797; SpCas9
tgctgcttccccttggaag

SEQ ID NO: 45148 - DNA, 18 bp, Artificial Sequence
  Synthetic: FXN 3 forward 9:69045776-69045797; SpCas9
gctgcttccccttggaag

SEQ ID NO: 45149 - DNA, 25 bp, Artificial Sequence
  Synthetic: FXN 3 forward 9:69045773-69045801; SpCas9
agtgctgcttccccttggaagtaga

SEQ ID NO: 45150 - DNA, 24 bp, Artificial Sequence
  Synthetic: FXN 3 forward 9:69045774-69045801; SpCas9
gtgctgcttccccttggaagtaga

SEQ ID NO: 45151 - DNA, 23 bp, Artificial Sequence
  Synthetic: FXN 3 forward 9:69045775-69045801; SpCas9
tgctgcttccccttggaagtaga

SEQ ID NO: 45152 - DNA, 22 bp, Artificial Sequence
  Synthetic: FXN 3 forward 9:69045776-69045801; SpCas9
gctgcttccccttggaagtaga

SEQ ID NO: 45153 - DNA, 21 bp, Artificial Sequence
  Synthetic: FXN 3 forward 9:69045777-69045801; SpCas9
ctgcttccccttggaagtaga

SEQ ID NO: 45154 - DNA, 20 bp, Artificial Sequence
  Synthetic: FXN 3 forward 9:69045778-69045801; SpCas9
tgcttccccttggaagtaga

SEQ ID NO: 45155 - DNA, 19 bp, Artificial Sequence
  Synthetic: FXN 3 forward 9:69045779-69045801; SpCas9
gcttccccttggaagtaga

SEQ ID NO: 45156 - DNA, 18 bp, Artificial Sequence
  Synthetic: FXN 3 forward 9:69045780-69045801; SpCas9
cttccccttggaagtaga

SEQ ID NO: 45157 - DNA, 25 bp, Artificial Sequence
  Synthetic: FXN 3 forward 9:69045776-69045804; SpCas9
gctgcttccccttggaagtagaaag

SEQ ID NO: 45158 - DNA, 24 bp, Artificial Sequence
  Synthetic: FXN 3 forward 9:69045777-69045804; SpCas9
ctgcttccccttggaagtagaaag

SEQ ID NO: 45159 - DNA, 23 bp, Artificial Sequence
  Synthetic: FXN 3 forward 9:69045778-69045804; SpCas9
tgcttccccttggaagtagaaag

SEQ ID NO: 45160 - DNA, 22 bp, Artificial Sequence
  Synthetic: FXN 3 forward 9:69045779-69045804; SpCas9
gcttccccttggaagtagaaag

SEQ ID NO: 45161 - DNA, 21 bp, Artificial Sequence
  Synthetic: FXN 3 forward 9:69045780-69045804; SpCas9
cttccccttggaagtagaaag

SEQ ID NO: 45162 - DNA, 20 bp, Artificial Sequence
  Synthetic: FXN 3 forward 9:69045781-69045804; SpCas9
ttccccttggaagtagaaag

SEQ ID NO: 45163 - DNA, 19 bp, Artificial Sequence
  Synthetic: FXN 3 forward 9:69045782-69045804; SpCas9
tccccttggaagtagaaag

SEQ ID NO: 45164 - DNA, 18 bp, Artificial Sequence
  Synthetic: FXN 3 forward 9:69045783-69045804; SpCas9
ccccttggaagtagaaag

SEQ ID NO: 45165 - DNA, 25 bp, Artificial Sequence
  Synthetic: FXN 3 reverse 9:69045777-69045805; SpCas9
tccactttctacttccaaggggaag

SEQ ID NO: 45166 - DNA, 24 bp, Artificial Sequence
  Synthetic: FXN 3 reverse 9:69045778-69045805; SpCas9
ccactttctacttccaaggggaag

SEQ ID NO: 45167 - DNA, 23 bp, Artificial Sequence
  Synthetic: FXN 3 reverse 9:69045779-69045805; SpCas9
cactttctacttccaaggggaag

SEQ ID NO: 45168 - DNA, 22 bp, Artificial Sequence
  Synthetic: FXN 3 reverse 9:69045780-69045805; SpCas9
actttctacttccaaggggaag

SEQ ID NO: 45169 - DNA, 21 bp, Artificial Sequence
  Synthetic: FXN 3 reverse 9:69045781-69045805; SpCas9
ctttctacttccaaggggaag

SEQ ID NO: 45170 - DNA, 20 bp, Artificial Sequence
  Synthetic: FXN 3 reverse 9:69045782-69045805; SpCas9
tttctacttccaaggggaag

SEQ ID NO: 45171 - DNA, 19 bp, Artificial Sequence
  Synthetic: FXN 3 reverse 9:69045783-69045805; SpCas9
ttctacttccaaggggaag

SEQ ID NO: 45172 - DNA, 18 bp, Artificial Sequence
  Synthetic: FXN 3 reverse 9:69045784-69045805; SpCas9
tctacttccaaggggaag

SEQ ID NO: 45173 - DNA, 25 bp, Artificial Sequence
  Synthetic: FXN 3 reverse 9:69045780-69045808; SpCas9
gtgtccactttctacttccaagggg

SEQ ID NO: 45174 - DNA, 24 bp, Artificial Sequence
  Synthetic: FXN 3 reverse 9:69045781-69045808; SpCas9
tgtccactttctacttccaagggg

SEQ ID NO: 45175 - DNA, 23 bp, Artificial Sequence
  Synthetic: FXN 3 reverse 9:69045782-69045808; SpCas9
gtccactttctacttccaagggg

SEQ ID NO: 45176 - DNA, 22 bp, Artificial Sequence
  Synthetic: FXN 3 reverse 9:69045783-69045808; SpCas9
tccactttctacttccaagggg

SEQ ID NO: 45177 - DNA, 21 bp, Artificial Sequence
  Synthetic: FXN 3 reverse 9:69045784-69045808; SpCas9
ccactttctacttccaagggg

SEQ ID NO: 45178 - DNA, 20 bp, Artificial Sequence
  Synthetic: FXN 3 reverse 9:69045785-69045808; SpCas9
cactttctacttccaagggg

SEQ ID NO: 45179 - DNA, 19 bp, Artificial Sequence
  Synthetic: FXN 3 reverse 9:69045786-69045808; SpCas9
actttctacttccaagggg

SEQ ID NO: 45180 - DNA, 18 bp, Artificial Sequence
  Synthetic: FXN 3 reverse 9:69045787-69045808; SpCas9
ctttctacttccaagggg

SEQ ID NO: 45181 - DNA, 25 bp, Artificial Sequence
  Synthetic: FXN 3 reverse 9:69045783-69045811; SpCas9
aaagtgtccactttctacttccaag

SEQ ID NO: 45182 - DNA, 24 bp, Artificial Sequence
  Synthetic: FXN 3 reverse 9:69045784-69045811; SpCas9
aagtgtccactttctacttccaag

SEQ ID NO: 45183 - DNA, 23 bp, Artificial Sequence
  Synthetic: FXN 3 reverse 9:69045785-69045811; SpCas9
agtgtccactttctacttccaag

SEQ ID NO: 45184 - DNA, 22 bp, Artificial Sequence
  Synthetic: FXN 3 reverse 9:69045786-69045811; SpCas9
gtgtccactttctacttccaag

SEQ ID NO: 45185 - DNA, 21 bp, Artificial Sequence
  Synthetic: FXN 3 reverse 9:69045787-69045811; SpCas9
tgtccactttctacttccaag

SEQ ID NO: 45186 - DNA, 20 bp, Artificial Sequence
  Synthetic: FXN 3 reverse 9:69045788-69045811; SpCas9
gtccactttctacttccaag

SEQ ID NO: 45187 - DNA, 19 bp, Artificial Sequence
  Synthetic: FXN 3 reverse 9:69045789-69045811; SpCas9
tccactttctacttccaag

SEQ ID NO: 45188 - DNA, 18 bp, Artificial Sequence
  Synthetic: FXN 3 reverse 9:69045790-69045811; SpCas9
ccactttctacttccaag

SEQ ID NO: 45189 - DNA, 25 bp, Artificial Sequence
  Synthetic: FXN 3 reverse 9:69045784-69045812; SpCas9
aaaagtgtccactttctacttccaa

SEQ ID NO: 45190 - DNA, 24 bp, Artificial Sequence
  Synthetic: FXN 3 reverse 9:69045785-69045812; SpCas9
aaagtgtccactttctacttccaa

SEQ ID NO: 45191 - DNA, 23 bp, Artificial Sequence
  Synthetic: FXN 3 reverse 9:69045786-69045812; SpCas9
aagtgtccactttctacttccaa

SEQ ID NO: 45192 - DNA, 22 bp, Artificial Sequence
  Synthetic: FXN 3 reverse 9:69045787-69045812; SpCas9
agtgtccactttctacttccaa

SEQ ID NO: 45193 - DNA, 21 bp, Artificial Sequence
  Synthetic: FXN 3 reverse 9:69045788-69045812; SpCas9
gtgtccactttctacttccaa

SEQ ID NO: 45194 - DNA, 20 bp, Artificial Sequence
  Synthetic: FXN 3 reverse 9:69045789-69045812; SpCas9
tgtccactttctacttccaa

SEQ ID NO: 45195 - DNA, 19 bp, Artificial Sequence
  Synthetic: FXN 3 reverse 9:69045790-69045812; SpCas9
gtccactttctacttccaa

SEQ ID NO: 45196 - DNA, 18 bp, Artificial Sequence
  Synthetic: FXN 3 reverse 9:69045791-69045812; SpCas9
tccactttctacttccaa

SEQ ID NO: 45197 - DNA, 25 bp, Artificial Sequence
  Synthetic: FXN 3 reverse 9:69045785-69045813; SpCas9
taaaagtgtccactttctacttcca

SEQ ID NO: 45198 - DNA, 24 bp, Artificial Sequence
  Synthetic: FXN 3 reverse 9:69045786-69045813; SpCas9
aaaagtgtccactttctacttcca

SEQ ID NO: 45199 - DNA, 23 bp, Artificial Sequence
  Synthetic: FXN 3 reverse 9:69045787-69045813; SpCas9
aaagtgtccactttctacttcca

SEQ ID NO: 45200 - DNA, 22 bp, Artificial Sequence
  Synthetic: FXN 3 reverse 9:69045788-69045813; SpCas9
aagtgtccactttctacttcca

SEQ ID NO: 45201 - DNA, 21 bp, Artificial Sequence
  Synthetic: FXN 3 reverse 9:69045789-69045813; SpCas9
agtgtccactttctacttcca

SEQ ID NO: 45202 - DNA, 20 bp, Artificial Sequence
  Synthetic: FXN 3 reverse 9:69045790-69045813; SpCas9
gtgtccactttctacttcca

SEQ ID NO: 45203 - DNA, 19 bp, Artificial Sequence
  Synthetic: FXN 3 reverse 9:69045791-69045813; SpCas9
tgtccactttctacttcca

SEQ ID NO: 45204 - DNA, 18 bp, Artificial Sequence
  Synthetic: FXN 3 reverse 9:69045792-69045813; SpCas9
gtccactttctacttcca

SEQ ID NO: 45205 - DNA, 25 bp, Artificial Sequence
  Synthetic: FXN 3 reverse 9:69045786-69045814; SpCas9
ataaaagtgtccactttctacttcc

SEQ ID NO: 45206 - DNA, 24 bp, Artificial Sequence
  Synthetic: FXN 3 reverse 9:69045787-69045814; SpCas9
taaaagtgtccactttctacttcc

SEQ ID NO: 45207 - DNA, 23 bp, Artificial Sequence
  Synthetic: FXN 3 reverse 9:69045788-69045814; SpCas9
aaaagtgtccactttctacttcc

SEQ ID NO: 45208 - DNA, 22 bp, Artificial Sequence
  Synthetic: FXN 3 reverse 9:69045789-69045814; SpCas9
aaagtgtccactttctacttcc

SEQ ID NO: 45209 - DNA, 21 bp, Artificial Sequence
  Synthetic: FXN 3 reverse 9:69045790-69045814; SpCas9
aagtgtccactttctacttcc

SEQ ID NO: 45210 - DNA, 20 bp, Artificial Sequence
  Synthetic: FXN 3 reverse 9:69045791-69045814; SpCas9
agtgtccactttctacttcc

SEQ ID NO: 45211 - DNA, 19 bp, Artificial Sequence
  Synthetic: FXN 3 reverse 9:69045792-69045814; SpCas9
gtgtccactttctacttcc

SEQ ID NO: 45212 - DNA, 18 bp, Artificial Sequence
  Synthetic: FXN 3 reverse 9:69045793-69045814; SpCas9
tgtccactttctacttcc

SEQ ID NO: 45213 - DNA, 25 bp, Artificial Sequence
  Synthetic: FXN 3 forward 9:69045789-69045817; SpCas9
ggaagtagaaagtggacacttttat

SEQ ID NO: 45214 - DNA, 24 bp, Artificial Sequence
  Synthetic: FXN 3 forward 9:69045790-69045817; SpCas9
gaagtagaaagtggacacttttat

SEQ ID NO: 45215 - DNA, 23 bp, Artificial Sequence
  Synthetic: FXN 3 forward 9:69045791-69045817; SpCas9
aagtagaaagtggacacttttat

SEQ ID NO: 45216 - DNA, 22 bp, Artificial Sequence
  Synthetic: FXN 3 forward 9:69045792-69045817; SpCas9
agtagaaagtggacacttttat

SEQ ID NO: 45217 - DNA, 21 bp, Artificial Sequence
  Synthetic: FXN 3 forward 9:69045793-69045817; SpCas9
gtagaaagtggacacttttat

SEQ ID NO: 45218 - DNA, 20 bp, Artificial Sequence
  Synthetic: FXN 3 forward 9:69045794-69045817; SpCas9
tagaaagtggacacttttat

SEQ ID NO: 45219 - DNA, 19 bp, Artificial Sequence
  Synthetic: FXN 3 forward 9:69045795-69045817; SpCas9
agaaagtggacacttttat

SEQ ID NO: 45220 - DNA, 18 bp, Artificial Sequence
  Synthetic: FXN 3 forward 9:69045796-69045817; SpCas9
gaaagtggacacttttat

SEQ ID NO: 45221 - DNA, 25 bp, Artificial Sequence
  Synthetic: FXN 3 forward 9:69045790-69045818; SpCas9
gaagtagaaagtggacacttttata

SEQ ID NO: 45222 - DNA, 24 bp, Artificial Sequence
  Synthetic: FXN 3 forward 9:69045791-69045818; SpCas9
aagtagaaagtggacacttttata

SEQ ID NO: 45223 - DNA, 23 bp, Artificial Sequence
  Synthetic: FXN 3 forward 9:69045792-69045818; SpCas9
agtagaaagtggacacttttata

SEQ ID NO: 45224 - DNA, 22 bp, Artificial Sequence
  Synthetic: FXN 3 forward 9:69045793-69045818; SpCas9
gtagaaagtggacacttttata

SEQ ID NO: 45225 - DNA, 21 bp, Artificial Sequence
  Synthetic: FXN 3 forward 9:69045794-69045818; SpCas9
tagaaagtggacacttttata

SEQ ID NO: 45226 - DNA, 20 bp, Artificial Sequence
  Synthetic: FXN 3 forward 9:69045795-69045818; SpCas9
agaaagtggacacttttata

SEQ ID NO: 45227 - DNA, 19 bp, Artificial Sequence
  Synthetic: FXN 3 forward 9:69045796-69045818; SpCas9
gaaagtggacacttttata

SEQ ID NO: 45228 - DNA, 18 bp, Artificial Sequence
  Synthetic: FXN 3 forward 9:69045797-69045818; SpCas9
aaagtggacacttttata

SEQ ID NO: 45229 - DNA, 25 bp, Artificial Sequence
  Synthetic: FXN 3 forward 9:69045794-69045822; SpCas9
tagaaagtggacacttttataaggt

SEQ ID NO: 45230 - DNA, 24 bp, Artificial Sequence
  Synthetic: FXN 3 forward 9:69045795-69045822; SpCas9
agaaagtggacacttttataaggt

SEQ ID NO: 45231 - DNA, 23 bp, Artificial Sequence
  Synthetic: FXN 3 forward 9:69045796-69045822; SpCas9
gaaagtggacacttttataaggt

SEQ ID NO: 45232 - DNA, 22 bp, Artificial Sequence
  Synthetic: FXN 3 forward 9:69045797-69045822; SpCas9
aaagtggacacttttataaggt

SEQ ID NO: 45233 - DNA, 21 bp, Artificial Sequence
  Synthetic: FXN 3 forward 9:69045798-69045822; SpCas9
aagtggacacttttataaggt

SEQ ID NO: 45234 - DNA, 20 bp, Artificial Sequence
  Synthetic: FXN 3 forward 9:69045799-69045822; SpCas9
agtggacacttttataaggt

SEQ ID NO: 45235 - DNA, 19 bp, Artificial Sequence
  Synthetic: FXN 3 forward 9:69045800-69045822; SpCas9
gtggacacttttataaggt

SEQ ID NO: 45236 - DNA, 18 bp, Artificial Sequence
  Synthetic: FXN 3 forward 9:69045801-69045822; SpCas9
tggacacttttataaggt

SEQ ID NO: 45237 - DNA, 25 bp, Artificial Sequence
  Synthetic: FXN 3 forward 9:69045795-69045823; SpCas9
agaaagtggacacttttataaggta

SEQ ID NO: 45238 - DNA, 24 bp, Artificial Sequence
  Synthetic: FXN 3 forward 9:69045796-69045823; SpCas9
gaaagtggacacttttataaggta

SEQ ID NO: 45239 - DNA, 23 bp, Artificial Sequence
  Synthetic: FXN 3 forward 9:69045797-69045823; SpCas9
aaagtggacacttttataaggta

SEQ ID NO: 45240 - DNA, 22 bp, Artificial Sequence
  Synthetic: FXN 3 forward 9:69045798-69045823; SpCas9
aagtggacacttttataaggta

SEQ ID NO: 45241 - DNA, 21 bp, Artificial Sequence
  Synthetic: FXN 3 forward 9:69045799-69045823; SpCas9
agtggacacttttataaggta

SEQ ID NO: 45242 - DNA, 20 bp, Artificial Sequence
  Synthetic: FXN 3 forward 9:69045800-69045823; SpCas9
gtggacacttttataaggta

SEQ ID NO: 45243 - DNA, 19 bp, Artificial Sequence
  Synthetic: FXN 3 forward 9:69045801-69045823; SpCas9
tggacacttttataaggta

SEQ ID NO: 45244 - DNA, 18 bp, Artificial Sequence
  Synthetic: FXN 3 forward 9:69045802-69045823; SpCas9
ggacacttttataaggta

SEQ ID NO: 45245 - DNA, 25 bp, Artificial Sequence
  Synthetic: FXN 3 forward 9:69045796-69045824; SpCas9
gaaagtggacacttttataaggtaa

SEQ ID NO: 45246 - DNA, 24 bp, Artificial Sequence
  Synthetic: FXN 3 forward 9:69045797-69045824; SpCas9
aaagtggacacttttataaggtaa

SEQ ID NO: 45247 - DNA, 23 bp, Artificial Sequence
  Synthetic: FXN 3 forward 9:69045798-69045824; SpCas9
aagtggacacttttataaggtaa

SEQ ID NO: 45248 - DNA, 22 bp, Artificial Sequence
  Synthetic: FXN 3 forward 9:69045799-69045824; SpCas9
agtggacacttttataaggtaa

SEQ ID NO: 45249 - DNA, 21 bp, Artificial Sequence
  Synthetic: FXN 3 forward 9:69045800-69045824; SpCas9
gtggacacttttataaggtaa

SEQ ID NO: 45250 - DNA, 20 bp, Artificial Sequence
  Synthetic: FXN 3 forward 9:69045801-69045824; SpCas9
tggacacttttataaggtaa

SEQ ID NO: 45251 - DNA, 19 bp, Artificial Sequence
  Synthetic: FXN 3 forward 9:69045802-69045824; SpCas9
ggacacttttataaggtaa

SEQ ID NO: 45252 - DNA, 18 bp, Artificial Sequence
  Synthetic: FXN 3 forward 9:69045803-69045824; SpCas9
gacacttttataaggtaa

SEQ ID NO: 45253 - DNA, 25 bp, Artificial Sequence
  Synthetic: FXN 3 forward 9:69045797-69045825; SpCas9
aaagtggacacttttataaggtaag

SEQ ID NO: 45254 - DNA, 24 bp, Artificial Sequence
  Synthetic: FXN 3 forward 9:69045798-69045825; SpCas9
aagtggacacttttataaggtaag

SEQ ID NO: 45255 - DNA, 23 bp, Artificial Sequence
  Synthetic: FXN 3 forward 9:69045799-69045825; SpCas9
agtggacacttttataaggtaag

SEQ ID NO: 45256 - DNA, 22 bp, Artificial Sequence
  Synthetic: FXN 3 forward 9:69045800-69045825; SpCas9
gtggacacttttataaggtaag

SEQ ID NO: 45257 - DNA, 21 bp, Artificial Sequence
  Synthetic: FXN 3 forward 9:69045801-69045825; SpCas9
tggacacttttataaggtaag

SEQ ID NO: 45258 - DNA, 20 bp, Artificial Sequence
  Synthetic: FXN 3 forward 9:69045802-69045825; SpCas9
ggacacttttataaggtaag

SEQ ID NO: 45259 - DNA, 19 bp, Artificial Sequence
  Synthetic: FXN 3 forward 9:69045803-69045825; SpCas9
gacacttttataaggtaag

SEQ ID NO: 45260 - DNA, 18 bp, Artificial Sequence
  Synthetic: FXN 3 forward 9:69045804-69045825; SpCas9
acacttttataaggtaag

SEQ ID NO: 45261 - DNA, 25 bp, Artificial Sequence
  Synthetic: FXN 3 forward 9:69045798-69045826; SpCas9
aagtggacacttttataaggtaagg

SEQ ID NO: 45262 - DNA, 24 bp, Artificial Sequence
  Synthetic: FXN 3 forward 9:69045799-69045826; SpCas9
agtggacacttttataaggtaagg

SEQ ID NO: 45263 - DNA, 23 bp, Artificial Sequence
  Synthetic: FXN 3 forward 9:69045800-69045826; SpCas9
gtggacacttttataaggtaagg

SEQ ID NO: 45264 - DNA, 22 bp, Artificial Sequence
  Synthetic: FXN 3 forward 9:69045801-69045826; SpCas9
tggacacttttataaggtaagg

SEQ ID NO: 45265 - DNA, 21 bp, Artificial Sequence
  Synthetic: FXN 3 forward 9:69045802-69045826; SpCas9
ggacacttttataaggtaagg

SEQ ID NO: 45266 - DNA, 20 bp, Artificial Sequence
  Synthetic: FXN 3 forward 9:69045803-69045826; SpCas9
gacacttttataaggtaagg

SEQ ID NO: 45267 - DNA, 19 bp, Artificial Sequence
  Synthetic: FXN 3 forward 9:69045804-69045826; SpCas9
acacttttataaggtaagg

SEQ ID NO: 45268 - DNA, 18 bp, Artificial Sequence
  Synthetic: FXN 3 forward 9:69045805-69045826; SpCas9
cacttttataaggtaagg

SEQ ID NO: 45269 - DNA, 25 bp, Artificial Sequence
  Synthetic: FXN 3 forward 9:69045799-69045827; SpCas9
agtggacacttttataaggtaaggg

SEQ ID NO: 45270 - DNA, 24 bp, Artificial Sequence
  Synthetic: FXN 3 forward 9:69045800-69045827; SpCas9
gtggacacttttataaggtaaggg

SEQ ID NO: 45271 - DNA, 23 bp, Artificial Sequence
  Synthetic: FXN 3 forward 9:69045801-69045827; SpCas9
tggacacttttataaggtaaggg

SEQ ID NO: 45272 - DNA, 22 bp, Artificial Sequence
  Synthetic: FXN 3 forward 9:69045802-69045827; SpCas9
ggacacttttataaggtaaggg

SEQ ID NO: 45273 - DNA, 21 bp, Artificial Sequence
  Synthetic: FXN 3 forward 9:69045803-69045827; SpCas9
gacacttttataaggtaaggg

SEQ ID NO: 45274 - DNA, 20 bp, Artificial Sequence
  Synthetic: FXN 3 forward 9:69045804-69045827; SpCas9
acacttttataaggtaaggg

SEQ ID NO: 45275 - DNA, 19 bp, Artificial Sequence
  Synthetic: FXN 3 forward 9:69045805-69045827; SpCas9
cacttttataaggtaaggg

SEQ ID NO: 45276 - DNA, 18 bp, Artificial Sequence
  Synthetic: FXN 3 forward 9:69045806-69045827; SpCas9
acttttataaggtaaggg

SEQ ID NO: 45277 - DNA, 25 bp, Artificial Sequence
  Synthetic: FXN 3 forward 9:69045802-69045830; SpCas9
ggacacttttataaggtaagggggg

SEQ ID NO: 45278 - DNA, 24 bp, Artificial Sequence
  Synthetic: FXN 3 forward 9:69045803-69045830; SpCas9
gacacttttataaggtaagggggg

SEQ ID NO: 45279 - DNA, 23 bp, Artificial Sequence
  Synthetic: FXN 3 forward 9:69045804-69045830; SpCas9
acacttttataaggtaagggggg

SEQ ID NO: 45280 - DNA, 22 bp, Artificial Sequence
  Synthetic: FXN 3 forward 9:69045805-69045830; SpCas9
cacttttataaggtaagggggg

SEQ ID NO: 45281 - DNA, 21 bp, Artificial Sequence
  Synthetic: FXN 3 forward 9:69045806-69045830; SpCas9
acttttataaggtaagggggg

SEQ ID NO: 45282 - DNA, 20 bp, Artificial Sequence
  Synthetic: FXN 3 forward 9:69045807-69045830; SpCas9
cttttataaggtaagggggg

SEQ ID NO: 45283 - DNA, 19 bp, Artificial Sequence
  Synthetic: FXN 3 forward 9:69045808-69045830; SpCas9
ttttataaggtaagggggg

SEQ ID NO: 45284 - DNA, 18 bp, Artificial Sequence
  Synthetic: FXN 3 forward 9:69045809-69045830; SpCas9
tttataaggtaagggggg

SEQ ID NO: 45285 - DNA, 25 bp, Artificial Sequence
  Synthetic: FXN 3 reverse 9:69045807-69045835; SpCas9
gcacacttccccccttaccttataa

SEQ ID NO: 45286 - DNA, 24 bp, Artificial Sequence
  Synthetic: FXN 3 reverse 9:69045808-69045835; SpCas9
cacacttccccccttaccttataa

SEQ ID NO: 45287 - DNA, 23 bp, Artificial Sequence
  Synthetic: FXN 3 reverse 9:69045809-69045835; SpCas9
acacttccccccttaccttataa

SEQ ID NO: 45288 - DNA, 22 bp, Artificial Sequence
  Synthetic: FXN 3 reverse 9:69045810-69045835; SpCas9
cacttccccccttaccttataa

SEQ ID NO: 45289 - DNA, 21 bp, Artificial Sequence
  Synthetic: FXN 3 reverse 9:69045811-69045835; SpCas9
acttccccccttaccttataa

SEQ ID NO: 45290 - DNA, 20 bp, Artificial Sequence
  Synthetic: FXN 3 reverse 9:69045812-69045835; SpCas9
cttccccccttaccttataa

SEQ ID NO: 45291 - DNA, 19 bp, Artificial Sequence
  Synthetic: FXN 3 reverse 9:69045813-69045835; SpCas9
ttccccccttaccttataa

SEQ ID NO: 45292 - DNA, 18 bp, Artificial Sequence
  Synthetic: FXN 3 reverse 9:69045814-69045835; SpCas9
tccccccttaccttataa

SEQ ID NO: 45293 - DNA, 25 bp, Artificial Sequence
  Synthetic: FXN 3 forward 9:69045810-69045838; SpCas9
ttataaggtaaggggggaagtgtgc

SEQ ID NO: 45294 - DNA, 24 bp, Artificial Sequence
  Synthetic: FXN 3 forward 9:69045811-69045838; SpCas9
tataaggtaaggggggaagtgtgc

SEQ ID NO: 45295 - DNA, 23 bp, Artificial Sequence
  Synthetic: FXN 3 forward 9:69045812-69045838; SpCas9
ataaggtaaggggggaagtgtgc

SEQ ID NO: 45296 - DNA, 22 bp, Artificial Sequence
  Synthetic: FXN 3 forward 9:69045813-69045838; SpCas9
taaggtaaggggggaagtgtgc

SEQ ID NO: 45297 - DNA, 21 bp, Artificial Sequence
  Synthetic: FXN 3 forward 9:69045814-69045838; SpCas9
aaggtaaggggggaagtgtgc

SEQ ID NO: 45298 - DNA, 20 bp, Artificial Sequence
  Synthetic: FXN 3 forward 9:69045815-69045838; SpCas9
aggtaaggggggaagtgtgc

SEQ ID NO: 45299 - DNA, 19 bp, Artificial Sequence
  Synthetic: FXN 3 forward 9:69045816-69045838; SpCas9
ggtaaggggggaagtgtgc

SEQ ID NO: 45300 - DNA, 18 bp, Artificial Sequence
  Synthetic: FXN 3 forward 9:69045817-69045838; SpCas9
gtaaggggggaagtgtgc

SEQ ID NO: 45301 - DNA, 25 bp, Artificial Sequence
  Synthetic: FXN 3 forward 9:69045811-69045839; SpCas9
tataaggtaaggggggaagtgtgca

SEQ ID NO: 45302 - DNA, 24 bp, Artificial Sequence
  Synthetic: FXN 3 forward 9:69045812-69045839; SpCas9
ataaggtaaggggggaagtgtgca

SEQ ID NO: 45303 - DNA, 23 bp, Artificial Sequence
  Synthetic: FXN 3 forward 9:69045813-69045839; SpCas9
taaggtaaggggggaagtgtgca

SEQ ID NO: 45304 - DNA, 22 bp, Artificial Sequence
  Synthetic: FXN 3 forward 9:69045814-69045839; SpCas9
aaggtaaggggggaagtgtgca

SEQ ID NO: 45305 - DNA, 21 bp, Artificial Sequence
  Synthetic: FXN 3 forward 9:69045815-69045839; SpCas9
aggtaaggggggaagtgtgca

SEQ ID NO: 45306 - DNA, 20 bp, Artificial Sequence
  Synthetic: FXN 3 forward 9:69045816-69045839; SpCas9
ggtaaggggggaagtgtgca

SEQ ID NO: 45307 - DNA, 19 bp, Artificial Sequence
  Synthetic: FXN 3 forward 9:69045817-69045839; SpCas9
gtaaggggggaagtgtgca

SEQ ID NO: 45308 - DNA, 18 bp, Artificial Sequence
  Synthetic: FXN 3 forward 9:69045818-69045839; SpCas9
taaggggggaagtgtgca

SEQ ID NO: 45309 - DNA, 25 bp, Artificial Sequence
  Synthetic: FXN 3 forward 9:69045812-69045840; SpCas9
ataaggtaaggggggaagtgtgcaa

SEQ ID NO: 45310 - DNA, 24 bp, Artificial Sequence
  Synthetic: FXN 3 forward 9:69045813-69045840; SpCas9
taaggtaaggggggaagtgtgcaa

SEQ ID NO: 45311 - DNA, 23 bp, Artificial Sequence
  Synthetic: FXN 3 forward 9:69045814-69045840; SpCas9
aaggtaaggggggaagtgtgcaa

SEQ ID NO: 45312 - DNA, 22 bp, Artificial Sequence
  Synthetic: FXN 3 forward 9:69045815-69045840; SpCas9
aggtaaggggggaagtgtgcaa

SEQ ID NO: 45313 - DNA, 21 bp, Artificial Sequence
  Synthetic: FXN 3 forward 9:69045816-69045840; SpCas9
ggtaaggggggaagtgtgcaa

SEQ ID NO: 45314 - DNA, 20 bp, Artificial Sequence
  Synthetic: FXN 3 forward 9:69045817-69045840; SpCas9
gtaaggggggaagtgtgcaa

SEQ ID NO: 45315 - DNA, 19 bp, Artificial Sequence
  Synthetic: FXN 3 forward 9:69045818-69045840; SpCas9
taaggggggaagtgtgcaa

SEQ ID NO: 45316 - DNA, 18 bp, Artificial Sequence
  Synthetic: FXN 3 forward 9:69045819-69045840; SpCas9
aaggggggaagtgtgcaa

SEQ ID NO: 45317 - DNA, 25 bp, Artificial Sequence
  Synthetic: FXN 3 forward 9:69045816-69045844; SpCas9
ggtaaggggggaagtgtgcaagggc

SEQ ID NO: 45318 - DNA, 24 bp, Artificial Sequence
  Synthetic: FXN 3 forward 9:69045817-69045844; SpCas9
gtaaggggggaagtgtgcaagggc

SEQ ID NO: 45319 - DNA, 23 bp, Artificial Sequence
  Synthetic: FXN 3 forward 9:69045818-69045844; SpCas9
taaggggggaagtgtgcaagggc

SEQ ID NO: 45320 - DNA, 22 bp, Artificial Sequence
  Synthetic: FXN 3 forward 9:69045819-69045844; SpCas9
aaggggggaagtgtgcaagggc

SEQ ID NO: 45321 - DNA, 21 bp, Artificial Sequence
  Synthetic: FXN 3 forward 9:69045820-69045844; SpCas9
aggggggaagtgtgcaagggc

SEQ ID NO: 45322 - DNA, 20 bp, Artificial Sequence
  Synthetic: FXN 3 forward 9:69045821-69045844; SpCas9
ggggggaagtgtgcaagggc

SEQ ID NO: 45323 - DNA, 19 bp, Artificial Sequence
  Synthetic: FXN 3 forward 9:69045822-69045844; SpCas9
gggggaagtgtgcaagggc

SEQ ID NO: 45324 - DNA, 18 bp, Artificial Sequence
  Synthetic: FXN 3 forward 9:69045823-69045844; SpCas9
ggggaagtgtgcaagggc

SEQ ID NO: 45325 - DNA, 25 bp, Artificial Sequence
  Synthetic: FXN 3 forward 9:69045819-69045847; SpCas9
aaggggggaagtgtgcaagggcaag

SEQ ID NO: 45326 - DNA, 24 bp, Artificial Sequence
  Synthetic: FXN 3 forward 9:69045820-69045847; SpCas9
aggggggaagtgtgcaagggcaag

SEQ ID NO: 45327 - DNA, 23 bp, Artificial Sequence
  Synthetic: FXN 3 forward 9:69045821-69045847; SpCas9
ggggggaagtgtgcaagggcaag

SEQ ID NO: 45328 - DNA, 22 bp, Artificial Sequence
  Synthetic: FXN 3 forward 9:69045822-69045847; SpCas9
gggggaagtgtgcaagggcaag

SEQ ID NO: 45329 - DNA, 21 bp, Artificial Sequence
  Synthetic: FXN 3 forward 9:69045823-69045847; SpCas9
ggggaagtgtgcaagggcaag

SEQ ID NO: 45330 - DNA, 20 bp, Artificial Sequence
  Synthetic: FXN 3 forward 9:69045824-69045847; SpCas9
gggaagtgtgcaagggcaag

SEQ ID NO: 45331 - DNA, 19 bp, Artificial Sequence
  Synthetic: FXN 3 forward 9:69045825-69045847; SpCas9
ggaagtgtgcaagggcaag

SEQ ID NO: 45332 - DNA, 18 bp, Artificial Sequence
  Synthetic: FXN 3 forward 9:69045826-69045847; SpCas9
gaagtgtgcaagggcaag

SEQ ID NO: 45333 - DNA, 25 bp, Artificial Sequence
  Synthetic: FXN 3 forward 9:69045820-69045848; SpCas9
aggggggaagtgtgcaagggcaagt

SEQ ID NO: 45334 - DNA, 24 bp, Artificial Sequence
  Synthetic: FXN 3 forward 9:69045821-69045848; SpCas9
ggggggaagtgtgcaagggcaagt

SEQ ID NO: 45335 - DNA, 23 bp, Artificial Sequence
  Synthetic: FXN 3 forward 9:69045822-69045848; SpCas9
gggggaagtgtgcaagggcaagt

SEQ ID NO: 45336 - DNA, 22 bp, Artificial Sequence
  Synthetic: FXN 3 forward 9:69045823-69045848; SpCas9
ggggaagtgtgcaagggcaagt

SEQ ID NO: 45337 - DNA, 21 bp, Artificial Sequence
  Synthetic: FXN 3 forward 9:69045824-69045848; SpCas9
gggaagtgtgcaagggcaagt

SEQ ID NO: 45338 - DNA, 20 bp, Artificial Sequence
  Synthetic: FXN 3 forward 9:69045825-69045848; SpCas9
ggaagtgtgcaagggcaagt

SEQ ID NO: 45339 - DNA, 19 bp, Artificial Sequence
  Synthetic: FXN 3 forward 9:69045826-69045848; SpCas9
gaagtgtgcaagggcaagt

SEQ ID NO: 45340 - DNA, 18 bp, Artificial Sequence
  Synthetic: FXN 3 forward 9:69045827-69045848; SpCas9
aagtgtgcaagggcaagt

SEQ ID NO: 45341 - DNA, 25 bp, Artificial Sequence
  Synthetic: FXN 3 forward 9:69045821-69045849; SpCas9
ggggggaagtgtgcaagggcaagtg

SEQ ID NO: 45342 - DNA, 24 bp, Artificial Sequence
  Synthetic: FXN 3 forward 9:69045822-69045849; SpCas9
gggggaagtgtgcaagggcaagtg

SEQ ID NO: 45343 - DNA, 23 bp, Artificial Sequence
  Synthetic: FXN 3 forward 9:69045823-69045849; SpCas9
ggggaagtgtgcaagggcaagtg

SEQ ID NO: 45344 - DNA, 22 bp, Artificial Sequence
  Synthetic: FXN 3 forward 9:69045824-69045849; SpCas9
gggaagtgtgcaagggcaagtg

SEQ ID NO: 45345 - DNA, 21 bp, Artificial Sequence
  Synthetic: FXN 3 forward 9:69045825-69045849; SpCas9
ggaagtgtgcaagggcaagtg

SEQ ID NO: 45346 - DNA, 20 bp, Artificial Sequence
  Synthetic: FXN 3 forward 9:69045826-69045849; SpCas9
gaagtgtgcaagggcaagtg

SEQ ID NO: 45347 - DNA, 19 bp, Artificial Sequence
  Synthetic: FXN 3 forward 9:69045827-69045849; SpCas9
aagtgtgcaagggcaagtg

SEQ ID NO: 45348 - DNA, 18 bp, Artificial Sequence
  Synthetic: FXN 3 forward 9:69045828-69045849; SpCas9
agtgtgcaagggcaagtg

SEQ ID NO: 45349 - DNA, 25 bp, Artificial Sequence
  Synthetic: FXN 3 forward 9:69045822-69045850; SpCas9
gggggaagtgtgcaagggcaagtgg

SEQ ID NO: 45350 - DNA, 24 bp, Artificial Sequence
  Synthetic: FXN 3 forward 9:69045823-69045850; SpCas9
ggggaagtgtgcaagggcaagtgg

SEQ ID NO: 45351 - DNA, 23 bp, Artificial Sequence
  Synthetic: FXN 3 forward 9:69045824-69045850; SpCas9
gggaagtgtgcaagggcaagtgg

SEQ ID NO: 45352 - DNA, 22 bp, Artificial Sequence
  Synthetic: FXN 3 forward 9:69045825-69045850; SpCas9
ggaagtgtgcaagggcaagtgg

SEQ ID NO: 45353 - DNA, 21 bp, Artificial Sequence
  Synthetic: FXN 3 forward 9:69045826-69045850; SpCas9
gaagtgtgcaagggcaagtgg

SEQ ID NO: 45354 - DNA, 20 bp, Artificial Sequence
  Synthetic: FXN 3 forward 9:69045827-69045850; SpCas9
aagtgtgcaagggcaagtgg

SEQ ID NO: 45355 - DNA, 19 bp, Artificial Sequence
  Synthetic: FXN 3 forward 9:69045828-69045850; SpCas9
agtgtgcaagggcaagtgg

SEQ ID NO: 45356 - DNA, 18 bp, Artificial Sequence
  Synthetic: FXN 3 forward 9:69045829-69045850; SpCas9
gtgtgcaagggcaagtgg

SEQ ID NO: 45357 - DNA, 25 bp, Artificial Sequence
  Synthetic: FXN 3 forward 9:69045823-69045851; SpCas9
ggggaagtgtgcaagggcaagtggg

SEQ ID NO: 45358 - DNA, 24 bp, Artificial Sequence
  Synthetic: FXN 3 forward 9:69045824-69045851; SpCas9
gggaagtgtgcaagggcaagtggg

SEQ ID NO: 45359 - DNA, 23 bp, Artificial Sequence
  Synthetic: FXN 3 forward 9:69045825-69045851; SpCas9
ggaagtgtgcaagggcaagtggg

SEQ ID NO: 45360 - DNA, 22 bp, Artificial Sequence
  Synthetic: FXN 3 forward 9:69045826-69045851; SpCas9
gaagtgtgcaagggcaagtggg

SEQ ID NO: 45361 - DNA, 21 bp, Artificial Sequence
  Synthetic: FXN 3 forward 9:69045827-69045851; SpCas9
aagtgtgcaagggcaagtggg

SEQ ID NO: 45362 - DNA, 20 bp, Artificial Sequence
  Synthetic: FXN 3 forward 9:69045828-69045851; SpCas9
agtgtgcaagggcaagtggg

SEQ ID NO: 45363 - DNA, 19 bp, Artificial Sequence
  Synthetic: FXN 3 forward 9:69045829-69045851; SpCas9
gtgtgcaagggcaagtggg

SEQ ID NO: 45364 - DNA, 18 bp, Artificial Sequence
  Synthetic: FXN 3 forward 9:69045830-69045851; SpCas9
tgtgcaagggcaagtggg

SEQ ID NO: 45365 - DNA, 25 bp, Artificial Sequence
  Synthetic: FXN 3 forward 9:69045824-69045852; SpCas9
gggaagtgtgcaagggcaagtgggg

SEQ ID NO: 45366 - DNA, 24 bp, Artificial Sequence
  Synthetic: FXN 3 forward 9:69045825-69045852; SpCas9
ggaagtgtgcaagggcaagtgggg

SEQ ID NO: 45367 - DNA, 23 bp, Artificial Sequence
  Synthetic: FXN 3 forward 9:69045826-69045852; SpCas9
gaagtgtgcaagggcaagtgggg

SEQ ID NO: 45368 - DNA, 22 bp, Artificial Sequence
  Synthetic: FXN 3 forward 9:69045827-69045852; SpCas9
aagtgtgcaagggcaagtgggg

SEQ ID NO: 45369 - DNA, 21 bp, Artificial Sequence
  Synthetic: FXN 3 forward 9:69045828-69045852; SpCas9
agtgtgcaagggcaagtgggg

SEQ ID NO: 45370 - DNA, 20 bp, Artificial Sequence
  Synthetic: FXN 3 forward 9:69045829-69045852; SpCas9
gtgtgcaagggcaagtgggg

SEQ ID NO: 45371 - DNA, 19 bp, Artificial Sequence
  Synthetic: FXN 3 forward 9:69045830-69045852; SpCas9
tgtgcaagggcaagtgggg

SEQ ID NO: 45372 - DNA, 18 bp, Artificial Sequence
  Synthetic: FXN 3 forward 9:69045831-69045852; SpCas9
gtgcaagggcaagtgggg

SEQ ID NO: 45373 - DNA, 25 bp, Artificial Sequence
  Synthetic: FXN 3 forward 9:69045836-69045864; SpCas9
agggcaagtgggggggtccctctgc

SEQ ID NO: 45374 - DNA, 24 bp, Artificial Sequence
  Synthetic: FXN 3 forward 9:69045837-69045864; SpCas9
gggcaagtgggggggtccctctgc

SEQ ID NO: 45375 - DNA, 23 bp, Artificial Sequence
  Synthetic: FXN 3 forward 9:69045838-69045864; SpCas9
ggcaagtgggggggtccctctgc

SEQ ID NO: 45376 - DNA, 22 bp, Artificial Sequence
  Synthetic: FXN 3 forward 9:69045839-69045864; SpCas9
gcaagtgggggggtccctctgc

SEQ ID NO: 45377 - DNA, 21 bp, Artificial Sequence
  Synthetic: FXN 3 forward 9:69045840-69045864; SpCas9
caagtgggggggtccctctgc

SEQ ID NO: 45378 - DNA, 20 bp, Artificial Sequence
  Synthetic: FXN 3 forward 9:69045841-69045864; SpCas9
aagtgggggggtccctctgc

SEQ ID NO: 45379 - DNA, 19 bp, Artificial Sequence
  Synthetic: FXN 3 forward 9:69045842-69045864; SpCas9
agtgggggggtccctctgc

SEQ ID NO: 45380 - DNA, 18 bp, Artificial Sequence
  Synthetic: FXN 3 forward 9:69045843-69045864; SpCas9
gtgggggggtccctctgc

SEQ ID NO: 45381 - DNA, 25 bp, Artificial Sequence
  Synthetic: FXN 3 reverse 9:69045853-69045881; SpCas9
gtagagtatgcacggaactagcaga

SEQ ID NO: 45382 - DNA, 24 bp, Artificial Sequence
  Synthetic: FXN 3 reverse 9:69045854-69045881; SpCas9
tagagtatgcacggaactagcaga

SEQ ID NO: 45383 - DNA, 23 bp, Artificial Sequence
  Synthetic: FXN 3 reverse 9:69045855-69045881; SpCas9
agagtatgcacggaactagcaga

SEQ ID NO: 45384 - DNA, 22 bp, Artificial Sequence
  Synthetic: FXN 3 reverse 9:69045856-69045881; SpCas9
gagtatgcacggaactagcaga

SEQ ID NO: 45385 - DNA, 21 bp, Artificial Sequence
  Synthetic: FXN 3 reverse 9:69045857-69045881; SpCas9
agtatgcacggaactagcaga

SEQ ID NO: 45386 - DNA, 20 bp, Artificial Sequence
  Synthetic: FXN 3 reverse 9:69045858-69045881; SpCas9
gtatgcacggaactagcaga

SEQ ID NO: 45387 - DNA, 19 bp, Artificial Sequence
  Synthetic: FXN 3 reverse 9:69045859-69045881; SpCas9
tatgcacggaactagcaga

SEQ ID NO: 45388 - DNA, 18 bp, Artificial Sequence
  Synthetic: FXN 3 reverse 9:69045860-69045881; SpCas9
atgcacggaactagcaga

SEQ ID NO: 45389 - DNA, 25 bp, Artificial Sequence
  Synthetic: FXN 3 reverse 9:69045854-69045882; SpCas9
tgtagagtatgcacggaactagcag

SEQ ID NO: 45390 - DNA, 24 bp, Artificial Sequence
  Synthetic: FXN 3 reverse 9:69045855-69045882; SpCas9
gtagagtatgcacggaactagcag

SEQ ID NO: 45391 - DNA, 23 bp, Artificial Sequence
  Synthetic: FXN 3 reverse 9:69045856-69045882; SpCas9
tagagtatgcacggaactagcag

SEQ ID NO: 45392 - DNA, 22 bp, Artificial Sequence
  Synthetic: FXN 3 reverse 9:69045857-69045882; SpCas9
agagtatgcacggaactagcag

SEQ ID NO: 45393 - DNA, 21 bp, Artificial Sequence
  Synthetic: FXN 3 reverse 9:69045858-69045882; SpCas9
gagtatgcacggaactagcag

SEQ ID NO: 45394 - DNA, 20 bp, Artificial Sequence
  Synthetic: FXN 3 reverse 9:69045859-69045882; SpCas9
agtatgcacggaactagcag

SEQ ID NO: 45395 - DNA, 19 bp, Artificial Sequence
  Synthetic: FXN 3 reverse 9:69045860-69045882; SpCas9
gtatgcacggaactagcag

SEQ ID NO: 45396 - DNA, 18 bp, Artificial Sequence
  Synthetic: FXN 3 reverse 9:69045861-69045882; SpCas9
tatgcacggaactagcag

SEQ ID NO: 45397 - DNA, 25 bp, Artificial Sequence
  Synthetic: FXN 3 forward 9:69045855-69045883; SpCas9
ctctgctagttccgtgcatactcta

SEQ ID NO: 45398 - DNA, 24 bp, Artificial Sequence
  Synthetic: FXN 3 forward 9:69045856-69045883; SpCas9
tctgctagttccgtgcatactcta

SEQ ID NO: 45399 - DNA, 23 bp, Artificial Sequence
  Synthetic: FXN 3 forward 9:69045857-69045883; SpCas9
ctgctagttccgtgcatactcta

SEQ ID NO: 45400 - DNA, 22 bp, Artificial Sequence
  Synthetic: FXN 3 forward 9:69045858-69045883; SpCas9
tgctagttccgtgcatactcta

SEQ ID NO: 45401 - DNA, 21 bp, Artificial Sequence
  Synthetic: FXN 3 forward 9:69045859-69045883; SpCas9
gctagttccgtgcatactcta

SEQ ID NO: 45402 - DNA, 20 bp, Artificial Sequence
  Synthetic: FXN 3 forward 9:69045860-69045883; SpCas9
ctagttccgtgcatactcta

SEQ ID NO: 45403 - DNA, 19 bp, Artificial Sequence
  Synthetic: FXN 3 forward 9:69045861-69045883; SpCas9
tagttccgtgcatactcta

SEQ ID NO: 45404 - DNA, 18 bp, Artificial Sequence
  Synthetic: FXN 3 forward 9:69045862-69045883; SpCas9
agttccgtgcatactcta

SEQ ID NO: 45405 - DNA, 25 bp, Artificial Sequence
  Synthetic: FXN 3 reverse 9:69045855-69045883; SpCas9
ctgtagagtatgcacggaactagca

SEQ ID NO: 45406 - DNA, 24 bp, Artificial Sequence
  Synthetic: FXN 3 reverse 9:69045856-69045883; SpCas9
tgtagagtatgcacggaactagca

SEQ ID NO: 45407 - DNA, 23 bp, Artificial Sequence
  Synthetic: FXN 3 reverse 9:69045857-69045883; SpCas9
gtagagtatgcacggaactagca

SEQ ID NO: 45408 - DNA, 22 bp, Artificial Sequence
  Synthetic: FXN 3 reverse 9:69045858-69045883; SpCas9
tagagtatgcacggaactagca

SEQ ID NO: 45409 - DNA, 21 bp, Artificial Sequence
  Synthetic: FXN 3 reverse 9:69045859-69045883; SpCas9
agagtatgcacggaactagca

SEQ ID NO: 45410 - DNA, 20 bp, Artificial Sequence
  Synthetic: FXN 3 reverse 9:69045860-69045883; SpCas9
gagtatgcacggaactagca

SEQ ID NO: 45411 - DNA, 19 bp, Artificial Sequence
  Synthetic: FXN 3 reverse 9:69045861-69045883; SpCas9
agtatgcacggaactagca

SEQ ID NO: 45412 - DNA, 18 bp, Artificial Sequence
  Synthetic: FXN 3 reverse 9:69045862-69045883; SpCas9
gtatgcacggaactagca

SEQ ID NO: 45413 - DNA, 25 bp, Artificial Sequence
  Synthetic: FXN 3 forward 9:69045856-69045884; SpCas9
tctgctagttccgtgcatactctac

SEQ ID NO: 45414 - DNA, 24 bp, Artificial Sequence
  Synthetic: FXN 3 forward 9:69045857-69045884; SpCas9
ctgctagttccgtgcatactctac

SEQ ID NO: 45415 - DNA, 23 bp, Artificial Sequence
  Synthetic: FXN 3 forward 9:69045858-69045884; SpCas9
tgctagttccgtgcatactctac

SEQ ID NO: 45416 - DNA, 22 bp, Artificial Sequence
  Synthetic: FXN 3 forward 9:69045859-69045884; SpCas9
gctagttccgtgcatactctac

SEQ ID NO: 45417 - DNA, 21 bp, Artificial Sequence
  Synthetic: FXN 3 forward 9:69045860-69045884; SpCas9
ctagttccgtgcatactctac

SEQ ID NO: 45418 - DNA, 20 bp, Artificial Sequence
  Synthetic: FXN 3 forward 9:69045861-69045884; SpCas9
tagttccgtgcatactctac

SEQ ID NO: 45419 - DNA, 19 bp, Artificial Sequence
  Synthetic: FXN 3 forward 9:69045862-69045884; SpCas9
agttccgtgcatactctac

SEQ ID NO: 45420 - DNA, 18 bp, Artificial Sequence
  Synthetic: FXN 3 forward 9:69045863-69045884; SpCas9
gttccgtgcatactctac

SEQ ID NO: 45421 - DNA, 25 bp, Artificial Sequence
  Synthetic: FXN 3 reverse 9:69045857-69045885; SpCas9
tcctgtagagtatgcacggaactag

SEQ ID NO: 45422 - DNA, 24 bp, Artificial Sequence
  Synthetic: FXN 3 reverse 9:69045858-69045885; SpCas9
cctgtagagtatgcacggaactag

SEQ ID NO: 45423 - DNA, 23 bp, Artificial Sequence
  Synthetic: FXN 3 reverse 9:69045859-69045885; SpCas9
ctgtagagtatgcacggaactag

SEQ ID NO: 45424 - DNA, 22 bp, Artificial Sequence
  Synthetic: FXN 3 reverse 9:69045860-69045885; SpCas9
tgtagagtatgcacggaactag

SEQ ID NO: 45425 - DNA, 21 bp, Artificial Sequence
  Synthetic: FXN 3 reverse 9:69045861-69045885; SpCas9
gtagagtatgcacggaactag

SEQ ID NO: 45426 - DNA, 20 bp, Artificial Sequence
  Synthetic: FXN 3 reverse 9:69045862-69045885; SpCas9
tagagtatgcacggaactag

SEQ ID NO: 45427 - DNA, 19 bp, Artificial Sequence
  Synthetic: FXN 3 reverse 9:69045863-69045885; SpCas9
agagtatgcacggaactag

SEQ ID NO: 45428 - DNA, 18 bp, Artificial Sequence
  Synthetic: FXN 3 reverse 9:69045864-69045885; SpCas9
gagtatgcacggaactag

SEQ ID NO: 45429 - DNA, 25 bp, Artificial Sequence
  Synthetic: FXN 3 forward 9:69045860-69045888; SpCas9
ctagttccgtgcatactctacagga

SEQ ID NO: 45430 - DNA, 24 bp, Artificial Sequence
  Synthetic: FXN 3 forward 9:69045861-69045888; SpCas9
tagttccgtgcatactctacagga

SEQ ID NO: 45431 - DNA, 23 bp, Artificial Sequence
  Synthetic: FXN 3 forward 9:69045862-69045888; SpCas9
agttccgtgcatactctacagga

SEQ ID NO: 45432 - DNA, 22 bp, Artificial Sequence
  Synthetic: FXN 3 forward 9:69045863-69045888; SpCas9
gttccgtgcatactctacagga

SEQ ID NO: 45433 - DNA, 21 bp, Artificial Sequence
  Synthetic: FXN 3 forward 9:69045864-69045888; SpCas9
ttccgtgcatactctacagga

SEQ ID NO: 45434 - DNA, 20 bp, Artificial Sequence
  Synthetic: FXN 3 forward 9:69045865-69045888; SpCas9
tccgtgcatactctacagga

SEQ ID NO: 45435 - DNA, 19 bp, Artificial Sequence
  Synthetic: FXN 3 forward 9:69045866-69045888; SpCas9
ccgtgcatactctacagga

SEQ ID NO: 45436 - DNA, 18 bp, Artificial Sequence
  Synthetic: FXN 3 forward 9:69045867-69045888; SpCas9
cgtgcatactctacagga

SEQ ID NO: 45437 - DNA, 25 bp, Artificial Sequence
  Synthetic: FXN 3 reverse 9:69045860-69045888; SpCas9
ctgtcctgtagagtatgcacggaac

SEQ ID NO: 45438 - DNA, 24 bp, Artificial Sequence
  Synthetic: FXN 3 reverse 9:69045861-69045888; SpCas9
tgtcctgtagagtatgcacggaac

SEQ ID NO: 45439 - DNA, 23 bp, Artificial Sequence
  Synthetic: FXN 3 reverse 9:69045862-69045888; SpCas9
gtcctgtagagtatgcacggaac

SEQ ID NO: 45440 - DNA, 22 bp, Artificial Sequence
  Synthetic: FXN 3 reverse 9:69045863-69045888; SpCas9
tcctgtagagtatgcacggaac

SEQ ID NO: 45441 - DNA, 21 bp, Artificial Sequence
  Synthetic: FXN 3 reverse 9:69045864-69045888; SpCas9
cctgtagagtatgcacggaac

SEQ ID NO: 45442 - DNA, 20 bp, Artificial Sequence
  Synthetic: FXN 3 reverse 9:69045865-69045888; SpCas9
ctgtagagtatgcacggaac

SEQ ID NO: 45443 - DNA, 19 bp, Artificial Sequence
  Synthetic: FXN 3 reverse 9:69045866-69045888; SpCas9
tgtagagtatgcacggaac

SEQ ID NO: 45444 - DNA, 18 bp, Artificial Sequence
  Synthetic: FXN 3 reverse 9:69045867-69045888; SpCas9
gtagagtatgcacggaac

SEQ ID NO: 45445 - DNA, 25 bp, Artificial Sequence
  Synthetic: FXN 3 reverse 9:69045866-69045894; SpCas9
agtcaactgtcctgtagagtatgca

SEQ ID NO: 45446 - DNA, 24 bp, Artificial Sequence
  Synthetic: FXN 3 reverse 9:69045867-69045894; SpCas9
gtcaactgtcctgtagagtatgca

SEQ ID NO: 45447 - DNA, 23 bp, Artificial Sequence
  Synthetic: FXN 3 reverse 9:69045868-69045894; SpCas9
tcaactgtcctgtagagtatgca

SEQ ID NO: 45448 - DNA, 22 bp, Artificial Sequence
  Synthetic: FXN 3 reverse 9:69045869-69045894; SpCas9
caactgtcctgtagagtatgca

SEQ ID NO: 45449 - DNA, 21 bp, Artificial Sequence
  Synthetic: FXN 3 reverse 9:69045870-69045894; SpCas9
aactgtcctgtagagtatgca

SEQ ID NO: 45450 - DNA, 20 bp, Artificial Sequence
  Synthetic: FXN 3 reverse 9:69045871-69045894; SpCas9
actgtcctgtagagtatgca

SEQ ID NO: 45451 - DNA, 19 bp, Artificial Sequence
  Synthetic: FXN 3 reverse 9:69045872-69045894; SpCas9
ctgtcctgtagagtatgca

SEQ ID NO: 45452 - DNA, 18 bp, Artificial Sequence
  Synthetic: FXN 3 reverse 9:69045873-69045894; SpCas9
tgtcctgtagagtatgca

SEQ ID NO: 45453 - DNA, 25 bp, Artificial Sequence
  Synthetic: FXN 3 forward 9:69045869-69045897; SpCas9
tgcatactctacaggacagttgact

SEQ ID NO: 45454 - DNA, 24 bp, Artificial Sequence
  Synthetic: FXN 3 forward 9:69045870-69045897; SpCas9
gcatactctacaggacagttgact

SEQ ID NO: 45455 - DNA, 23 bp, Artificial Sequence
  Synthetic: FXN 3 forward 9:69045871-69045897; SpCas9
catactctacaggacagttgact

SEQ ID NO: 45456 - DNA, 22 bp, Artificial Sequence
  Synthetic: FXN 3 forward 9:69045872-69045897; SpCas9
atactctacaggacagttgact

SEQ ID NO: 45457 - DNA, 21 bp, Artificial Sequence
  Synthetic: FXN 3 forward 9:69045873-69045897; SpCas9
tactctacaggacagttgact

SEQ ID NO: 45458 - DNA, 20 bp, Artificial Sequence
  Synthetic: FXN 3 forward 9:69045874-69045897; SpCas9
actctacaggacagttgact

SEQ ID NO: 45459 - DNA, 19 bp, Artificial Sequence
  Synthetic: FXN 3 forward 9:69045875-69045897; SpCas9
ctctacaggacagttgact

SEQ ID NO: 45460 - DNA, 18 bp, Artificial Sequence
  Synthetic: FXN 3 forward 9:69045876-69045897; SpCas9
tctacaggacagttgact

SEQ ID NO: 45461 - DNA, 25 bp, Artificial Sequence
  Synthetic: FXN 3 reverse 9:69045875-69045903; SpCas9
aaggtgccaagtcaactgtcctgta

SEQ ID NO: 45462 - DNA, 24 bp, Artificial Sequence
  Synthetic: FXN 3 reverse 9:69045876-69045903; SpCas9
aggtgccaagtcaactgtcctgta

SEQ ID NO: 45463 - DNA, 23 bp, Artificial Sequence
  Synthetic: FXN 3 reverse 9:69045877-69045903; SpCas9
ggtgccaagtcaactgtcctgta

SEQ ID NO: 45464 - DNA, 22 bp, Artificial Sequence
  Synthetic: FXN 3 reverse 9:69045878-69045903; SpCas9
gtgccaagtcaactgtcctgta

SEQ ID NO: 45465 - DNA, 21 bp, Artificial Sequence
  Synthetic: FXN 3 reverse 9:69045879-69045903; SpCas9
tgccaagtcaactgtcctgta

SEQ ID NO: 45466 - DNA, 20 bp, Artificial Sequence
  Synthetic: FXN 3 reverse 9:69045880-69045903; SpCas9
gccaagtcaactgtcctgta

SEQ ID NO: 45467 - DNA, 19 bp, Artificial Sequence
  Synthetic: FXN 3 reverse 9:69045881-69045903; SpCas9
ccaagtcaactgtcctgta

SEQ ID NO: 45468 - DNA, 18 bp, Artificial Sequence
  Synthetic: FXN 3 reverse 9:69045882-69045903; SpCas9
caagtcaactgtcctgta

SEQ ID NO: 45469 - DNA, 25 bp, Artificial Sequence
  Synthetic: FXN 3 reverse 9:69045877-69045905; SpCas9
ggaaggtgccaagtcaactgtcctg

SEQ ID NO: 45470 - DNA, 24 bp, Artificial Sequence
  Synthetic: FXN 3 reverse 9:69045878-69045905; SpCas9
gaaggtgccaagtcaactgtcctg

SEQ ID NO: 45471 - DNA, 23 bp, Artificial Sequence
  Synthetic: FXN 3 reverse 9:69045879-69045905; SpCas9
aaggtgccaagtcaactgtcctg

SEQ ID NO: 45472 - DNA, 22 bp, Artificial Sequence
  Synthetic: FXN 3 reverse 9:69045880-69045905; SpCas9
aggtgccaagtcaactgtcctg

SEQ ID NO: 45473 - DNA, 21 bp, Artificial Sequence
  Synthetic: FXN 3 reverse 9:69045881-69045905; SpCas9
ggtgccaagtcaactgtcctg

SEQ ID NO: 45474 - DNA, 20 bp, Artificial Sequence
  Synthetic: FXN 3 reverse 9:69045882-69045905; SpCas9
gtgccaagtcaactgtcctg

SEQ ID NO: 45475 - DNA, 19 bp, Artificial Sequence
  Synthetic: FXN 3 reverse 9:69045883-69045905; SpCas9
tgccaagtcaactgtcctg

SEQ ID NO: 45476 - DNA, 18 bp, Artificial Sequence
  Synthetic: FXN 3 reverse 9:69045884-69045905; SpCas9
gccaagtcaactgtcctg

SEQ ID NO: 45477 - DNA, 25 bp, Artificial Sequence
  Synthetic: FXN 3 forward 9:69045880-69045908; SpCas9
caggacagttgacttggcaccttcc

SEQ ID NO: 45478 - DNA, 24 bp, Artificial Sequence
  Synthetic: FXN 3 forward 9:69045881-69045908; SpCas9
aggacagttgacttggcaccttcc

SEQ ID NO: 45479 - DNA, 23 bp, Artificial Sequence
  Synthetic: FXN 3 forward 9:69045882-69045908; SpCas9
ggacagttgacttggcaccttcc

SEQ ID NO: 45480 - DNA, 22 bp, Artificial Sequence
  Synthetic: FXN 3 forward 9:69045883-69045908; SpCas9
gacagttgacttggcaccttcc

SEQ ID NO: 45481 - DNA, 21 bp, Artificial Sequence
  Synthetic: FXN 3 forward 9:69045884-69045908; SpCas9
acagttgacttggcaccttcc

SEQ ID NO: 45482 - DNA, 20 bp, Artificial Sequence
  Synthetic: FXN 3 forward 9:69045885-69045908; SpCas9
cagttgacttggcaccttcc

SEQ ID NO: 45483 - DNA, 19 bp, Artificial Sequence
  Synthetic: FXN 3 forward 9:69045886-69045908; SpCas9
agttgacttggcaccttcc

SEQ ID NO: 45484 - DNA, 18 bp, Artificial Sequence
  Synthetic: FXN 3 forward 9:69045887-69045908; SpCas9
gttgacttggcaccttcc

SEQ ID NO: 45485 - DNA, 25 bp, Artificial Sequence
  Synthetic: FXN 3 forward 9:69045884-69045912; SpCas9
acagttgacttggcaccttcctggt

SEQ ID NO: 45486 - DNA, 24 bp, Artificial Sequence
  Synthetic: FXN 3 forward 9:69045885-69045912; SpCas9
cagttgacttggcaccttcctggt

SEQ ID NO: 45487 - DNA, 23 bp, Artificial Sequence
  Synthetic: FXN 3 forward 9:69045886-69045912; SpCas9
agttgacttggcaccttcctggt

SEQ ID NO: 45488 - DNA, 22 bp, Artificial Sequence
  Synthetic: FXN 3 forward 9:69045887-69045912; SpCas9
gttgacttggcaccttcctggt

SEQ ID NO: 45489 - DNA, 21 bp, Artificial Sequence
  Synthetic: FXN 3 forward 9:69045888-69045912; SpCas9
ttgacttggcaccttcctggt

SEQ ID NO: 45490 - DNA, 20 bp, Artificial Sequence
  Synthetic: FXN 3 forward 9:69045889-69045912; SpCas9
tgacttggcaccttcctggt

SEQ ID NO: 45491 - DNA, 19 bp, Artificial Sequence
  Synthetic: FXN 3 forward 9:69045890-69045912; SpCas9
gacttggcaccttcctggt

SEQ ID NO: 45492 - DNA, 18 bp, Artificial Sequence
  Synthetic: FXN 3 forward 9:69045891-69045912; SpCas9
acttggcaccttcctggt

SEQ ID NO: 45493 - DNA, 25 bp, Artificial Sequence
  Synthetic: FXN 3 forward 9:69045891-69045919; SpCas9
acttggcaccttcctggttagtaat

SEQ ID NO: 45494 - DNA, 24 bp, Artificial Sequence
  Synthetic: FXN 3 forward 9:69045892-69045919; SpCas9
cttggcaccttcctggttagtaat

SEQ ID NO: 45495 - DNA, 23 bp, Artificial Sequence
  Synthetic: FXN 3 forward 9:69045893-69045919; SpCas9
ttggcaccttcctggttagtaat

SEQ ID NO: 45496 - DNA, 22 bp, Artificial Sequence
  Synthetic: FXN 3 forward 9:69045894-69045919; SpCas9
tggcaccttcctggttagtaat

SEQ ID NO: 45497 - DNA, 21 bp, Artificial Sequence
  Synthetic: FXN 3 forward 9:69045895-69045919; SpCas9
ggcaccttcctggttagtaat

SEQ ID NO: 45498 - DNA, 20 bp, Artificial Sequence
  Synthetic: FXN 3 forward 9:69045896-69045919; SpCas9
gcaccttcctggttagtaat

SEQ ID NO: 45499 - DNA, 19 bp, Artificial Sequence
  Synthetic: FXN 3 forward 9:69045897-69045919; SpCas9
caccttcctggttagtaat

SEQ ID NO: 45500 - DNA, 18 bp, Artificial Sequence
  Synthetic: FXN 3 forward 9:69045898-69045919; SpCas9
accttcctggttagtaat

SEQ ID NO: 45501 - DNA, 25 bp, Artificial Sequence
  Synthetic: FXN 3 reverse 9:69045892-69045920; SpCas9
gcttattactaaccaggaaggtgcc

SEQ ID NO: 45502 - DNA, 24 bp, Artificial Sequence
  Synthetic: FXN 3 reverse 9:69045893-69045920; SpCas9
cttattactaaccaggaaggtgcc

SEQ ID NO: 45503 - DNA, 23 bp, Artificial Sequence
  Synthetic: FXN 3 reverse 9:69045894-69045920; SpCas9
ttattactaaccaggaaggtgcc

SEQ ID NO: 45504 - DNA, 22 bp, Artificial Sequence
  Synthetic: FXN 3 reverse 9:69045895-69045920; SpCas9
tattactaaccaggaaggtgcc

SEQ ID NO: 45505 - DNA, 21 bp, Artificial Sequence
  Synthetic: FXN 3 reverse 9:69045896-69045920; SpCas9
attactaaccaggaaggtgcc

SEQ ID NO: 45506 - DNA, 20 bp, Artificial Sequence
  Synthetic: FXN 3 reverse 9:69045897-69045920; SpCas9
ttactaaccaggaaggtgcc

SEQ ID NO: 45507 - DNA, 19 bp, Artificial Sequence
  Synthetic: FXN 3 reverse 9:69045898-69045920; SpCas9
tactaaccaggaaggtgcc

SEQ ID NO: 45508 - DNA, 18 bp, Artificial Sequence
  Synthetic: FXN 3 reverse 9:69045899-69045920; SpCas9
actaaccaggaaggtgcc

SEQ ID NO: 45509 - DNA, 25 bp, Artificial Sequence
  Synthetic: FXN 3 forward 9:69045897-69045925; SpCas9
caccttcctggttagtaataagctg

SEQ ID NO: 45510 - DNA, 24 bp, Artificial Sequence
  Synthetic: FXN 3 forward 9:69045898-69045925; SpCas9
accttcctggttagtaataagctg

SEQ ID NO: 45511 - DNA, 23 bp, Artificial Sequence
  Synthetic: FXN 3 forward 9:69045899-69045925; SpCas9
ccttcctggttagtaataagctg

SEQ ID NO: 45512 - DNA, 22 bp, Artificial Sequence
  Synthetic: FXN 3 forward 9:69045900-69045925; SpCas9
cttcctggttagtaataagctg

SEQ ID NO: 45513 - DNA, 21 bp, Artificial Sequence
  Synthetic: FXN 3 forward 9:69045901-69045925; SpCas9
ttcctggttagtaataagctg

SEQ ID NO: 45514 - DNA, 20 bp, Artificial Sequence
  Synthetic: FXN 3 forward 9:69045902-69045925; SpCas9
tcctggttagtaataagctg

SEQ ID NO: 45515 - DNA, 19 bp, Artificial Sequence
  Synthetic: FXN 3 forward 9:69045903-69045925; SpCas9
cctggttagtaataagctg

SEQ ID NO: 45516 - DNA, 18 bp, Artificial Sequence
  Synthetic: FXN 3 forward 9:69045904-69045925; SpCas9
ctggttagtaataagctg

SEQ ID NO: 45517 - DNA, 25 bp, Artificial Sequence
  Synthetic: FXN 3 reverse 9:69045899-69045927; SpCas9
tgctacagcttattactaaccagga

SEQ ID NO: 45518 - DNA, 24 bp, Artificial Sequence
  Synthetic: FXN 3 reverse 9:69045900-69045927; SpCas9
gctacagcttattactaaccagga

SEQ ID NO: 45519 - DNA, 23 bp, Artificial Sequence
  Synthetic: FXN 3 reverse 9:69045901-69045927; SpCas9
ctacagcttattactaaccagga

SEQ ID NO: 45520 - DNA, 22 bp, Artificial Sequence
  Synthetic: FXN 3 reverse 9:69045902-69045927; SpCas9
tacagcttattactaaccagga

SEQ ID NO: 45521 - DNA, 21 bp, Artificial Sequence
  Synthetic: FXN 3 reverse 9:69045903-69045927; SpCas9
acagcttattactaaccagga

SEQ ID NO: 45522 - DNA, 20 bp, Artificial Sequence
  Synthetic: FXN 3 reverse 9:69045904-69045927; SpCas9
cagcttattactaaccagga

SEQ ID NO: 45523 - DNA, 19 bp, Artificial Sequence
  Synthetic: FXN 3 reverse 9:69045905-69045927; SpCas9
agcttattactaaccagga

SEQ ID NO: 45524 - DNA, 18 bp, Artificial Sequence
  Synthetic: FXN 3 reverse 9:69045906-69045927; SpCas9
gcttattactaaccagga

SEQ ID NO: 45525 - DNA, 25 bp, Artificial Sequence
  Synthetic: FXN 3 forward 9:69045900-69045928; SpCas9
cttcctggttagtaataagctgtag

SEQ ID NO: 45526 - DNA, 24 bp, Artificial Sequence
  Synthetic: FXN 3 forward 9:69045901-69045928; SpCas9
ttcctggttagtaataagctgtag

SEQ ID NO: 45527 - DNA, 23 bp, Artificial Sequence
  Synthetic: FXN 3 forward 9:69045902-69045928; SpCas9
tcctggttagtaataagctgtag

SEQ ID NO: 45528 - DNA, 22 bp, Artificial Sequence
  Synthetic: FXN 3 forward 9:69045903-69045928; SpCas9
cctggttagtaataagctgtag

SEQ ID NO: 45529 - DNA, 21 bp, Artificial Sequence
  Synthetic: FXN 3 forward 9:69045904-69045928; SpCas9
ctggttagtaataagctgtag

SEQ ID NO: 45530 - DNA, 20 bp, Artificial Sequence
  Synthetic: FXN 3 forward 9:69045905-69045928; SpCas9
tggttagtaataagctgtag

SEQ ID NO: 45531 - DNA, 19 bp, Artificial Sequence
  Synthetic: FXN 3 forward 9:69045906-69045928; SpCas9
ggttagtaataagctgtag

SEQ ID NO: 45532 - DNA, 18 bp, Artificial Sequence
  Synthetic: FXN 3 forward 9:69045907-69045928; SpCas9
gttagtaataagctgtag

SEQ ID NO: 45533 - DNA, 25 bp, Artificial Sequence
  Synthetic: FXN 3 reverse 9:69045900-69045928; SpCas9
ctgctacagcttattactaaccagg

SEQ ID NO: 45534 - DNA, 24 bp, Artificial Sequence
  Synthetic: FXN 3 reverse 9:69045901-69045928; SpCas9
tgctacagcttattactaaccagg

SEQ ID NO: 45535 - DNA, 23 bp, Artificial Sequence
  Synthetic: FXN 3 reverse 9:69045902-69045928; SpCas9
gctacagcttattactaaccagg

SEQ ID NO: 45536 - DNA, 22 bp, Artificial Sequence
  Synthetic: FXN 3 reverse 9:69045903-69045928; SpCas9
ctacagcttattactaaccagg

SEQ ID NO: 45537 - DNA, 21 bp, Artificial Sequence
  Synthetic: FXN 3 reverse 9:69045904-69045928; SpCas9
tacagcttattactaaccagg

SEQ ID NO: 45538 - DNA, 20 bp, Artificial Sequence
  Synthetic: FXN 3 reverse 9:69045905-69045928; SpCas9
acagcttattactaaccagg

SEQ ID NO: 45539 - DNA, 19 bp, Artificial Sequence
  Synthetic: FXN 3 reverse 9:69045906-69045928; SpCas9
cagcttattactaaccagg

SEQ ID NO: 45540 - DNA, 18 bp, Artificial Sequence
  Synthetic: FXN 3 reverse 9:69045907-69045928; SpCas9
agcttattactaaccagg

SEQ ID NO: 45541 - DNA, 25 bp, Artificial Sequence
  Synthetic: FXN 3 forward 9:69045903-69045931; SpCas9
cctggttagtaataagctgtagcag

SEQ ID NO: 45542 - DNA, 24 bp, Artificial Sequence
  Synthetic: FXN 3 forward 9:69045904-69045931; SpCas9
ctggttagtaataagctgtagcag

SEQ ID NO: 45543 - DNA, 23 bp, Artificial Sequence
  Synthetic: FXN 3 forward 9:69045905-69045931; SpCas9
tggttagtaataagctgtagcag

SEQ ID NO: 45544 - DNA, 22 bp, Artificial Sequence
  Synthetic: FXN 3 forward 9:69045906-69045931; SpCas9
ggttagtaataagctgtagcag

SEQ ID NO: 45545 - DNA, 21 bp, Artificial Sequence
  Synthetic: FXN 3 forward 9:69045907-69045931; SpCas9
gttagtaataagctgtagcag

SEQ ID NO: 45546 - DNA, 20 bp, Artificial Sequence
  Synthetic: FXN 3 forward 9:69045908-69045931; SpCas9
ttagtaataagctgtagcag

SEQ ID NO: 45547 - DNA, 19 bp, Artificial Sequence
  Synthetic: FXN 3 forward 9:69045909-69045931; SpCas9
tagtaataagctgtagcag

SEQ ID NO: 45548 - DNA, 18 bp, Artificial Sequence
  Synthetic: FXN 3 forward 9:69045910-69045931; SpCas9
agtaataagctgtagcag

SEQ ID NO: 45549 - DNA, 25 bp, Artificial Sequence
  Synthetic: FXN 3 reverse 9:69045903-69045931; SpCas9
ccactgctacagcttattactaacc

SEQ ID NO: 45550 - DNA, 24 bp, Artificial Sequence
  Synthetic: FXN 3 reverse 9:69045904-69045931; SpCas9
cactgctacagcttattactaacc

SEQ ID NO: 45551 - DNA, 23 bp, Artificial Sequence
  Synthetic: FXN 3 reverse 9:69045905-69045931; SpCas9
actgctacagcttattactaacc

SEQ ID NO: 45552 - DNA, 22 bp, Artificial Sequence
  Synthetic: FXN 3 reverse 9:69045906-69045931; SpCas9
ctgctacagcttattactaacc

SEQ ID NO: 45553 - DNA, 21 bp, Artificial Sequence
  Synthetic: FXN 3 reverse 9:69045907-69045931; SpCas9
tgctacagcttattactaacc

SEQ ID NO: 45554 - DNA, 20 bp, Artificial Sequence
  Synthetic: FXN 3 reverse 9:69045908-69045931; SpCas9
gctacagcttattactaacc

SEQ ID NO: 45555 - DNA, 19 bp, Artificial Sequence
  Synthetic: FXN 3 reverse 9:69045909-69045931; SpCas9
ctacagcttattactaacc

SEQ ID NO: 45556 - DNA, 18 bp, Artificial Sequence
  Synthetic: FXN 3 reverse 9:69045910-69045931; SpCas9
tacagcttattactaacc

SEQ ID NO: 45557 - DNA, 25 bp, Artificial Sequence
  Synthetic: FXN 3 reverse 9:69045904-69045932; SpCas9
gccactgctacagcttattactaac

SEQ ID NO: 45558 - DNA, 24 bp, Artificial Sequence
  Synthetic: FXN 3 reverse 9:69045905-69045932; SpCas9
ccactgctacagcttattactaac

SEQ ID NO: 45559 - DNA, 23 bp, Artificial Sequence
  Synthetic: FXN 3 reverse 9:69045906-69045932; SpCas9
cactgctacagcttattactaac

SEQ ID NO: 45560 - DNA, 22 bp, Artificial Sequence
  Synthetic: FXN 3 reverse 9:69045907-69045932; SpCas9
actgctacagcttattactaac

SEQ ID NO: 45561 - DNA, 21 bp, Artificial Sequence
  Synthetic: FXN 3 reverse 9:69045908-69045932; SpCas9
ctgctacagcttattactaac

SEQ ID NO: 45562 - DNA, 20 bp, Artificial Sequence
  Synthetic: FXN 3 reverse 9:69045909-69045932; SpCas9
tgctacagcttattactaac

SEQ ID NO: 45563 - DNA, 19 bp, Artificial Sequence
  Synthetic: FXN 3 reverse 9:69045910-69045932; SpCas9
gctacagcttattactaac

SEQ ID NO: 45564 - DNA, 18 bp, Artificial Sequence
  Synthetic: FXN 3 reverse 9:69045911-69045932; SpCas9
ctacagcttattactaac

SEQ ID NO: 45565 - DNA, 25 bp, Artificial Sequence
  Synthetic: FXN 3 forward 9:69045908-69045936; SpCas9
ttagtaataagctgtagcagtggcc

SEQ ID NO: 45566 - DNA, 24 bp, Artificial Sequence
  Synthetic: FXN 3 forward 9:69045909-69045936; SpCas9
tagtaataagctgtagcagtggcc

SEQ ID NO: 45567 - DNA, 23 bp, Artificial Sequence
  Synthetic: FXN 3 forward 9:69045910-69045936; SpCas9
agtaataagctgtagcagtggcc

SEQ ID NO: 45568 - DNA, 22 bp, Artificial Sequence
  Synthetic: FXN 3 forward 9:69045911-69045936; SpCas9
gtaataagctgtagcagtggcc

SEQ ID NO: 45569 - DNA, 21 bp, Artificial Sequence
  Synthetic: FXN 3 forward 9:69045912-69045936; SpCas9
taataagctgtagcagtggcc

SEQ ID NO: 45570 - DNA, 20 bp, Artificial Sequence
  Synthetic: FXN 3 forward 9:69045913-69045936; SpCas9
aataagctgtagcagtggcc

SEQ ID NO: 45571 - DNA, 19 bp, Artificial Sequence
  Synthetic: FXN 3 forward 9:69045914-69045936; SpCas9
ataagctgtagcagtggcc

SEQ ID NO: 45572 - DNA, 18 bp, Artificial Sequence
  Synthetic: FXN 3 forward 9:69045915-69045936; SpCas9
taagctgtagcagtggcc

SEQ ID NO: 45573 - DNA, 25 bp, Artificial Sequence
  Synthetic: FXN 3 forward 9:69045911-69045939; SpCas9
gtaataagctgtagcagtggccaag

SEQ ID NO: 45574 - DNA, 24 bp, Artificial Sequence
  Synthetic: FXN 3 forward 9:69045912-69045939; SpCas9
taataagctgtagcagtggccaag

SEQ ID NO: 45575 - DNA, 23 bp, Artificial Sequence
  Synthetic: FXN 3 forward 9:69045913-69045939; SpCas9
aataagctgtagcagtggccaag

SEQ ID NO: 45576 - DNA, 22 bp, Artificial Sequence
  Synthetic: FXN 3 forward 9:69045914-69045939; SpCas9
ataagctgtagcagtggccaag

SEQ ID NO: 45577 - DNA, 21 bp, Artificial Sequence
  Synthetic: FXN 3 forward 9:69045915-69045939; SpCas9
taagctgtagcagtggccaag

SEQ ID NO: 45578 - DNA, 20 bp, Artificial Sequence
  Synthetic: FXN 3 forward 9:69045916-69045939; SpCas9
aagctgtagcagtggccaag

SEQ ID NO: 45579 - DNA, 19 bp, Artificial Sequence
  Synthetic: FXN 3 forward 9:69045917-69045939; SpCas9
agctgtagcagtggccaag

SEQ ID NO: 45580 - DNA, 18 bp, Artificial Sequence
  Synthetic: FXN 3 forward 9:69045918-69045939; SpCas9
gctgtagcagtggccaag

SEQ ID NO: 45581 - DNA, 25 bp, Artificial Sequence
  Synthetic: FXN 3 forward 9:69045912-69045940; SpCas9
taataagctgtagcagtggccaagt

SEQ ID NO: 45582 - DNA, 24 bp, Artificial Sequence
  Synthetic: FXN 3 forward 9:69045913-69045940; SpCas9
aataagctgtagcagtggccaagt

SEQ ID NO: 45583 - DNA, 23 bp, Artificial Sequence
  Synthetic: FXN 3 forward 9:69045914-69045940; SpCas9
ataagctgtagcagtggccaagt

SEQ ID NO: 45584 - DNA, 22 bp, Artificial Sequence
  Synthetic: FXN 3 forward 9:69045915-69045940; SpCas9
taagctgtagcagtggccaagt

SEQ ID NO: 45585 - DNA, 21 bp, Artificial Sequence
  Synthetic: FXN 3 forward 9:69045916-69045940; SpCas9
aagctgtagcagtggccaagt

SEQ ID NO: 45586 - DNA, 20 bp, Artificial Sequence
  Synthetic: FXN 3 forward 9:69045917-69045940; SpCas9
agctgtagcagtggccaagt

SEQ ID NO: 45587 - DNA, 19 bp, Artificial Sequence
  Synthetic: FXN 3 forward 9:69045918-69045940; SpCas9
gctgtagcagtggccaagt

SEQ ID NO: 45588 - DNA, 18 bp, Artificial Sequence
  Synthetic: FXN 3 forward 9:69045919-69045940; SpCas9
ctgtagcagtggccaagt

SEQ ID NO: 45589 - DNA, 25 bp, Artificial Sequence
  Synthetic: FXN 3 reverse 9:69045919-69045947; SpCas9
aagcatgcccacttggccactgcta

SEQ ID NO: 45590 - DNA, 24 bp, Artificial Sequence
  Synthetic: FXN 3 reverse 9:69045920-69045947; SpCas9
agcatgcccacttggccactgcta

SEQ ID NO: 45591 - DNA, 23 bp, Artificial Sequence
  Synthetic: FXN 3 reverse 9:69045921-69045947; SpCas9
gcatgcccacttggccactgcta

SEQ ID NO: 45592 - DNA, 22 bp, Artificial Sequence
  Synthetic: FXN 3 reverse 9:69045922-69045947; SpCas9
catgcccacttggccactgcta

SEQ ID NO: 45593 - DNA, 21 bp, Artificial Sequence
  Synthetic: FXN 3 reverse 9:69045923-69045947; SpCas9
atgcccacttggccactgcta

SEQ ID NO: 45594 - DNA, 20 bp, Artificial Sequence
  Synthetic: FXN 3 reverse 9:69045924-69045947; SpCas9
tgcccacttggccactgcta

SEQ ID NO: 45595 - DNA, 19 bp, Artificial Sequence
  Synthetic: FXN 3 reverse 9:69045925-69045947; SpCas9
gcccacttggccactgcta

SEQ ID NO: 45596 - DNA, 18 bp, Artificial Sequence
  Synthetic: FXN 3 reverse 9:69045926-69045947; SpCas9
cccacttggccactgcta

SEQ ID NO: 45597 - DNA, 25 bp, Artificial Sequence
  Synthetic: FXN 3 forward 9:69045923-69045951; SpCas9
agcagtggccaagtgggcatgcttt

SEQ ID NO: 45598 - DNA, 24 bp, Artificial Sequence
  Synthetic: FXN 3 forward 9:69045924-69045951; SpCas9
gcagtggccaagtgggcatgcttt

SEQ ID NO: 45599 - DNA, 23 bp, Artificial Sequence
  Synthetic: FXN 3 forward 9:69045925-69045951; SpCas9
cagtggccaagtgggcatgcttt

SEQ ID NO: 45600 - DNA, 22 bp, Artificial Sequence
  Synthetic: FXN 3 forward 9:69045926-69045951; SpCas9
agtggccaagtgggcatgcttt

SEQ ID NO: 45601 - DNA, 21 bp, Artificial Sequence
  Synthetic: FXN 3 forward 9:69045927-69045951; SpCas9
gtggccaagtgggcatgcttt

SEQ ID NO: 45602 - DNA, 20 bp, Artificial Sequence
  Synthetic: FXN 3 forward 9:69045928-69045951; SpCas9
tggccaagtgggcatgcttt

SEQ ID NO: 45603 - DNA, 19 bp, Artificial Sequence
  Synthetic: FXN 3 forward 9:69045929-69045951; SpCas9
ggccaagtgggcatgcttt

SEQ ID NO: 45604 - DNA, 18 bp, Artificial Sequence
  Synthetic: FXN 3 forward 9:69045930-69045951; SpCas9
gccaagtgggcatgcttt

SEQ ID NO: 45605 - DNA, 25 bp, Artificial Sequence
  Synthetic: FXN 3 reverse 9:69045931-69045959; SpCas9
agggcatactgaaagcatgcccact

SEQ ID NO: 45606 - DNA, 24 bp, Artificial Sequence
  Synthetic: FXN 3 reverse 9:69045932-69045959; SpCas9
gggcatactgaaagcatgcccact

SEQ ID NO: 45607 - DNA, 23 bp, Artificial Sequence
  Synthetic: FXN 3 reverse 9:69045933-69045959; SpCas9
ggcatactgaaagcatgcccact

SEQ ID NO: 45608 - DNA, 22 bp, Artificial Sequence
  Synthetic: FXN 3 reverse 9:69045934-69045959; SpCas9
gcatactgaaagcatgcccact

SEQ ID NO: 45609 - DNA, 21 bp, Artificial Sequence
  Synthetic: FXN 3 reverse 9:69045935-69045959; SpCas9
catactgaaagcatgcccact

SEQ ID NO: 45610 - DNA, 20 bp, Artificial Sequence
  Synthetic: FXN 3 reverse 9:69045936-69045959; SpCas9
atactgaaagcatgcccact

SEQ ID NO: 45611 - DNA, 19 bp, Artificial Sequence
  Synthetic: FXN 3 reverse 9:69045937-69045959; SpCas9
tactgaaagcatgcccact

SEQ ID NO: 45612 - DNA, 18 bp, Artificial Sequence
  Synthetic: FXN 3 reverse 9:69045938-69045959; SpCas9
actgaaagcatgcccact

SEQ ID NO: 45613 - DNA, 25 bp, Artificial Sequence
  Synthetic: FXN 3 forward 9:69045936-69045964; SpCas9
tgggcatgctttcagtatgccctcc

SEQ ID NO: 45614 - DNA, 24 bp, Artificial Sequence
  Synthetic: FXN 3 forward 9:69045937-69045964; SpCas9
gggcatgctttcagtatgccctcc

SEQ ID NO: 45615 - DNA, 23 bp, Artificial Sequence
  Synthetic: FXN 3 forward 9:69045938-69045964; SpCas9
ggcatgctttcagtatgccctcc

SEQ ID NO: 45616 - DNA, 22 bp, Artificial Sequence
  Synthetic: FXN 3 forward 9:69045939-69045964; SpCas9
gcatgctttcagtatgccctcc

SEQ ID NO: 45617 - DNA, 21 bp, Artificial Sequence
  Synthetic: FXN 3 forward 9:69045940-69045964; SpCas9
catgctttcagtatgccctcc

SEQ ID NO: 45618 - DNA, 20 bp, Artificial Sequence
  Synthetic: FXN 3 forward 9:69045941-69045964; SpCas9
atgctttcagtatgccctcc

SEQ ID NO: 45619 - DNA, 19 bp, Artificial Sequence
  Synthetic: FXN 3 forward 9:69045942-69045964; SpCas9
tgctttcagtatgccctcc

SEQ ID NO: 45620 - DNA, 18 bp, Artificial Sequence
  Synthetic: FXN 3 forward 9:69045943-69045964; SpCas9
gctttcagtatgccctcc

SEQ ID NO: 45621 - DNA, 25 bp, Artificial Sequence
  Synthetic: FXN 3 reverse 9:69045944-69045972; SpCas9
ttcattcactgggagggcatactga

SEQ ID NO: 45622 - DNA, 24 bp, Artificial Sequence
  Synthetic: FXN 3 reverse 9:69045945-69045972; SpCas9
tcattcactgggagggcatactga

SEQ ID NO: 45623 - DNA, 23 bp, Artificial Sequence
  Synthetic: FXN 3 reverse 9:69045946-69045972; SpCas9
cattcactgggagggcatactga

SEQ ID NO: 45624 - DNA, 22 bp, Artificial Sequence
  Synthetic: FXN 3 reverse 9:69045947-69045972; SpCas9
attcactgggagggcatactga

SEQ ID NO: 45625 - DNA, 21 bp, Artificial Sequence
  Synthetic: FXN 3 reverse 9:69045948-69045972; SpCas9
ttcactgggagggcatactga

SEQ ID NO: 45626 - DNA, 20 bp, Artificial Sequence
  Synthetic: FXN 3 reverse 9:69045949-69045972; SpCas9
tcactgggagggcatactga

SEQ ID NO: 45627 - DNA, 19 bp, Artificial Sequence
  Synthetic: FXN 3 reverse 9:69045950-69045972; SpCas9
cactgggagggcatactga

SEQ ID NO: 45628 - DNA, 18 bp, Artificial Sequence
  Synthetic: FXN 3 reverse 9:69045951-69045972; SpCas9
actgggagggcatactga

SEQ ID NO: 45629 - DNA, 25 bp, Artificial Sequence
  Synthetic: FXN 3 forward 9:69045946-69045974; SpCas9
ttcagtatgccctcccagtgaatga

SEQ ID NO: 45630 - DNA, 24 bp, Artificial Sequence
  Synthetic: FXN 3 forward 9:69045947-69045974; SpCas9
tcagtatgccctcccagtgaatga

SEQ ID NO: 45631 - DNA, 23 bp, Artificial Sequence
  Synthetic: FXN 3 forward 9:69045948-69045974; SpCas9
cagtatgccctcccagtgaatga

SEQ ID NO: 45632 - DNA, 22 bp, Artificial Sequence
  Synthetic: FXN 3 forward 9:69045949-69045974; SpCas9
agtatgccctcccagtgaatga

SEQ ID NO: 45633 - DNA, 21 bp, Artificial Sequence
  Synthetic: FXN 3 forward 9:69045950-69045974; SpCas9
gtatgccctcccagtgaatga

SEQ ID NO: 45634 - DNA, 20 bp, Artificial Sequence
  Synthetic: FXN 3 forward 9:69045951-69045974; SpCas9
tatgccctcccagtgaatga

SEQ ID NO: 45635 - DNA, 19 bp, Artificial Sequence
  Synthetic: FXN 3 forward 9:69045952-69045974; SpCas9
atgccctcccagtgaatga

SEQ ID NO: 45636 - DNA, 18 bp, Artificial Sequence
  Synthetic: FXN 3 forward 9:69045953-69045974; SpCas9
tgccctcccagtgaatga

SEQ ID NO: 45637 - DNA, 25 bp, Artificial Sequence
  Synthetic: FXN 3 forward 9:69045953-69045981; SpCas9
tgccctcccagtgaatgaaagtcct

SEQ ID NO: 45638 - DNA, 24 bp, Artificial Sequence
  Synthetic: FXN 3 forward 9:69045954-69045981; SpCas9
gccctcccagtgaatgaaagtcct

SEQ ID NO: 45639 - DNA, 23 bp, Artificial Sequence
  Synthetic: FXN 3 forward 9:69045955-69045981; SpCas9
ccctcccagtgaatgaaagtcct

SEQ ID NO: 45640 - DNA, 22 bp, Artificial Sequence
  Synthetic: FXN 3 forward 9:69045956-69045981; SpCas9
cctcccagtgaatgaaagtcct

SEQ ID NO: 45641 - DNA, 21 bp, Artificial Sequence
  Synthetic: FXN 3 forward 9:69045957-69045981; SpCas9
ctcccagtgaatgaaagtcct

SEQ ID NO: 45642 - DNA, 20 bp, Artificial Sequence
  Synthetic: FXN 3 forward 9:69045958-69045981; SpCas9
tcccagtgaatgaaagtcct

SEQ ID NO: 45643 - DNA, 19 bp, Artificial Sequence
  Synthetic: FXN 3 forward 9:69045959-69045981; SpCas9
cccagtgaatgaaagtcct

SEQ ID NO: 45644 - DNA, 18 bp, Artificial Sequence
  Synthetic: FXN 3 forward 9:69045960-69045981; SpCas9
ccagtgaatgaaagtcct

SEQ ID NO: 45645 - DNA, 25 bp, Artificial Sequence
  Synthetic: FXN 3 forward 9:69045954-69045982; SpCas9
gccctcccagtgaatgaaagtcctg

SEQ ID NO: 45646 - DNA, 24 bp, Artificial Sequence
  Synthetic: FXN 3 forward 9:69045955-69045982; SpCas9
ccctcccagtgaatgaaagtcctg

SEQ ID NO: 45647 - DNA, 23 bp, Artificial Sequence
  Synthetic: FXN 3 forward 9:69045956-69045982; SpCas9
cctcccagtgaatgaaagtcctg

SEQ ID NO: 45648 - DNA, 22 bp, Artificial Sequence
  Synthetic: FXN 3 forward 9:69045957-69045982; SpCas9
ctcccagtgaatgaaagtcctg

SEQ ID NO: 45649 - DNA, 21 bp, Artificial Sequence
  Synthetic: FXN 3 forward 9:69045958-69045982; SpCas9
tcccagtgaatgaaagtcctg

SEQ ID NO: 45650 - DNA, 20 bp, Artificial Sequence
  Synthetic: FXN 3 forward 9:69045959-69045982; SpCas9
cccagtgaatgaaagtcctg

SEQ ID NO: 45651 - DNA, 19 bp, Artificial Sequence
  Synthetic: FXN 3 forward 9:69045960-69045982; SpCas9
ccagtgaatgaaagtcctg

SEQ ID NO: 45652 - DNA, 18 bp, Artificial Sequence
  Synthetic: FXN 3 forward 9:69045961-69045982; SpCas9
cagtgaatgaaagtcctg

SEQ ID NO: 45653 - DNA, 25 bp, Artificial Sequence
  Synthetic: FXN 3 reverse 9:69045955-69045983; SpCas9
gcctcaggactttcattcactggga

SEQ ID NO: 45654 - DNA, 24 bp, Artificial Sequence
  Synthetic: FXN 3 reverse 9:69045956-69045983; SpCas9
cctcaggactttcattcactggga

SEQ ID NO: 45655 - DNA, 23 bp, Artificial Sequence
  Synthetic: FXN 3 reverse 9:69045957-69045983; SpCas9
ctcaggactttcattcactggga

SEQ ID NO: 45656 - DNA, 22 bp, Artificial Sequence
  Synthetic: FXN 3 reverse 9:69045958-69045983; SpCas9
tcaggactttcattcactggga

SEQ ID NO: 45657 - DNA, 21 bp, Artificial Sequence
  Synthetic: FXN 3 reverse 9:69045959-69045983; SpCas9
caggactttcattcactggga

SEQ ID NO: 45658 - DNA, 20 bp, Artificial Sequence
  Synthetic: FXN 3 reverse 9:69045960-69045983; SpCas9
aggactttcattcactggga

SEQ ID NO: 45659 - DNA, 19 bp, Artificial Sequence
  Synthetic: FXN 3 reverse 9:69045961-69045983; SpCas9
ggactttcattcactggga

SEQ ID NO: 45660 - DNA, 18 bp, Artificial Sequence
  Synthetic: FXN 3 reverse 9:69045962-69045983; SpCas9
gactttcattcactggga

SEQ ID NO: 45661 - DNA, 25 bp, Artificial Sequence
  Synthetic: FXN 3 reverse 9:69045956-69045984; SpCas9
tgcctcaggactttcattcactggg

SEQ ID NO: 45662 - DNA, 24 bp, Artificial Sequence
  Synthetic: FXN 3 reverse 9:69045957-69045984; SpCas9
gcctcaggactttcattcactggg

SEQ ID NO: 45663 - DNA, 23 bp, Artificial Sequence
  Synthetic: FXN 3 reverse 9:69045958-69045984; SpCas9
cctcaggactttcattcactggg

SEQ ID NO: 45664 - DNA, 22 bp, Artificial Sequence
  Synthetic: FXN 3 reverse 9:69045959-69045984; SpCas9
ctcaggactttcattcactggg

SEQ ID NO: 45665 - DNA, 21 bp, Artificial Sequence
  Synthetic: FXN 3 reverse 9:69045960-69045984; SpCas9
tcaggactttcattcactggg

SEQ ID NO: 45666 - DNA, 20 bp, Artificial Sequence
  Synthetic: FXN 3 reverse 9:69045961-69045984; SpCas9
caggactttcattcactggg

SEQ ID NO: 45667 - DNA, 19 bp, Artificial Sequence
  Synthetic: FXN 3 reverse 9:69045962-69045984; SpCas9
aggactttcattcactggg

SEQ ID NO: 45668 - DNA, 18 bp, Artificial Sequence
  Synthetic: FXN 3 reverse 9:69045963-69045984; SpCas9
ggactttcattcactggg

SEQ ID NO: 45669 - DNA, 25 bp, Artificial Sequence
  Synthetic: FXN 3 reverse 9:69045957-69045985; SpCas9
ttgcctcaggactttcattcactgg

SEQ ID NO: 45670 - DNA, 24 bp, Artificial Sequence
  Synthetic: FXN 3 reverse 9:69045958-69045985; SpCas9
tgcctcaggactttcattcactgg

SEQ ID NO: 45671 - DNA, 23 bp, Artificial Sequence
  Synthetic: FXN 3 reverse 9:69045959-69045985; SpCas9
gcctcaggactttcattcactgg

SEQ ID NO: 45672 - DNA, 22 bp, Artificial Sequence
  Synthetic: FXN 3 reverse 9:69045960-69045985; SpCas9
cctcaggactttcattcactgg

SEQ ID NO: 45673 - DNA, 21 bp, Artificial Sequence
  Synthetic: FXN 3 reverse 9:69045961-69045985; SpCas9
ctcaggactttcattcactgg

SEQ ID NO: 45674 - DNA, 20 bp, Artificial Sequence
  Synthetic: FXN 3 reverse 9:69045962-69045985; SpCas9
tcaggactttcattcactgg

SEQ ID NO: 45675 - DNA, 19 bp, Artificial Sequence
  Synthetic: FXN 3 reverse 9:69045963-69045985; SpCas9
caggactttcattcactgg

SEQ ID NO: 45676 - DNA, 18 bp, Artificial Sequence
  Synthetic: FXN 3 reverse 9:69045964-69045985; SpCas9
aggactttcattcactgg

SEQ ID NO: 45677 - DNA, 25 bp, Artificial Sequence
  Synthetic: FXN 3 reverse 9:69045959-69045987; SpCas9
ggttgcctcaggactttcattcact

SEQ ID NO: 45678 - DNA, 24 bp, Artificial Sequence
  Synthetic: FXN 3 reverse 9:69045960-69045987; SpCas9
gttgcctcaggactttcattcact

SEQ ID NO: 45679 - DNA, 23 bp, Artificial Sequence
  Synthetic: FXN 3 reverse 9:69045961-69045987; SpCas9
ttgcctcaggactttcattcact

SEQ ID NO: 45680 - DNA, 22 bp, Artificial Sequence
  Synthetic: FXN 3 reverse 9:69045962-69045987; SpCas9
tgcctcaggactttcattcact

SEQ ID NO: 45681 - DNA, 21 bp, Artificial Sequence
  Synthetic: FXN 3 reverse 9:69045963-69045987; SpCas9
gcctcaggactttcattcact

SEQ ID NO: 45682 - DNA, 20 bp, Artificial Sequence
  Synthetic: FXN 3 reverse 9:69045964-69045987; SpCas9
cctcaggactttcattcact

SEQ ID NO: 45683 - DNA, 19 bp, Artificial Sequence
  Synthetic: FXN 3 reverse 9:69045965-69045987; SpCas9
ctcaggactttcattcact

SEQ ID NO: 45684 - DNA, 18 bp, Artificial Sequence
  Synthetic: FXN 3 reverse 9:69045966-69045987; SpCas9
tcaggactttcattcact

SEQ ID NO: 45685 - DNA, 25 bp, Artificial Sequence
  Synthetic: FXN 3 reverse 9:69045960-69045988; SpCas9
gggttgcctcaggactttcattcac

SEQ ID NO: 45686 - DNA, 24 bp, Artificial Sequence
  Synthetic: FXN 3 reverse 9:69045961-69045988; SpCas9
ggttgcctcaggactttcattcac

SEQ ID NO: 45687 - DNA, 23 bp, Artificial Sequence
  Synthetic: FXN 3 reverse 9:69045962-69045988; SpCas9
gttgcctcaggactttcattcac

SEQ ID NO: 45688 - DNA, 22 bp, Artificial Sequence
  Synthetic: FXN 3 reverse 9:69045963-69045988; SpCas9
ttgcctcaggactttcattcac

SEQ ID NO: 45689 - DNA, 21 bp, Artificial Sequence
  Synthetic: FXN 3 reverse 9:69045964-69045988; SpCas9
tgcctcaggactttcattcac

SEQ ID NO: 45690 - DNA, 20 bp, Artificial Sequence
  Synthetic: FXN 3 reverse 9:69045965-69045988; SpCas9
gcctcaggactttcattcac

SEQ ID NO: 45691 - DNA, 19 bp, Artificial Sequence
  Synthetic: FXN 3 reverse 9:69045966-69045988; SpCas9
cctcaggactttcattcac

SEQ ID NO: 45692 - DNA, 18 bp, Artificial Sequence
  Synthetic: FXN 3 reverse 9:69045967-69045988; SpCas9
ctcaggactttcattcac

SEQ ID NO: 45693 - DNA, 25 bp, Artificial Sequence
  Synthetic: FXN 3 forward 9:69045965-69045993; SpCas9
gaatgaaagtcctgaggcaaccccc

SEQ ID NO: 45694 - DNA, 24 bp, Artificial Sequence
  Synthetic: FXN 3 forward 9:69045966-69045993; SpCas9
aatgaaagtcctgaggcaaccccc

SEQ ID NO: 45695 - DNA, 23 bp, Artificial Sequence
  Synthetic: FXN 3 forward 9:69045967-69045993; SpCas9
atgaaagtcctgaggcaaccccc

SEQ ID NO: 45696 - DNA, 22 bp, Artificial Sequence
  Synthetic: FXN 3 forward 9:69045968-69045993; SpCas9
tgaaagtcctgaggcaaccccc

SEQ ID NO: 45697 - DNA, 21 bp, Artificial Sequence
  Synthetic: FXN 3 forward 9:69045969-69045993; SpCas9
gaaagtcctgaggcaaccccc

SEQ ID NO: 45698 - DNA, 20 bp, Artificial Sequence
  Synthetic: FXN 3 forward 9:69045970-69045993; SpCas9
aaagtcctgaggcaaccccc

SEQ ID NO: 45699 - DNA, 19 bp, Artificial Sequence
  Synthetic: FXN 3 forward 9:69045971-69045993; SpCas9
aagtcctgaggcaaccccc

SEQ ID NO: 45700 - DNA, 18 bp, Artificial Sequence
  Synthetic: FXN 3 forward 9:69045972-69045993; SpCas9
agtcctgaggcaaccccc

SEQ ID NO: 45701 - DNA, 25 bp, Artificial Sequence
  Synthetic: FXN 3 forward 9:69045966-69045994; SpCas9
aatgaaagtcctgaggcaaccccca

SEQ ID NO: 45702 - DNA, 24 bp, Artificial Sequence
  Synthetic: FXN 3 forward 9:69045967-69045994; SpCas9
atgaaagtcctgaggcaaccccca

SEQ ID NO: 45703 - DNA, 23 bp, Artificial Sequence
  Synthetic: FXN 3 forward 9:69045968-69045994; SpCas9
tgaaagtcctgaggcaaccccca

SEQ ID NO: 45704 - DNA, 22 bp, Artificial Sequence
  Synthetic: FXN 3 forward 9:69045969-69045994; SpCas9
gaaagtcctgaggcaaccccca

SEQ ID NO: 45705 - DNA, 21 bp, Artificial Sequence
  Synthetic: FXN 3 forward 9:69045970-69045994; SpCas9
aaagtcctgaggcaaccccca

SEQ ID NO: 45706 - DNA, 20 bp, Artificial Sequence
  Synthetic: FXN 3 forward 9:69045971-69045994; SpCas9
aagtcctgaggcaaccccca

SEQ ID NO: 45707 - DNA, 19 bp, Artificial Sequence
  Synthetic: FXN 3 forward 9:69045972-69045994; SpCas9
agtcctgaggcaaccccca

SEQ ID NO: 45708 - DNA, 18 bp, Artificial Sequence
  Synthetic: FXN 3 forward 9:69045973-69045994; SpCas9
gtcctgaggcaaccccca

SEQ ID NO: 45709 - DNA, 25 bp, Artificial Sequence
  Synthetic: FXN 3 forward 9:69045967-69045995; SpCas9
atgaaagtcctgaggcaacccccaa

SEQ ID NO: 45710 - DNA, 24 bp, Artificial Sequence
  Synthetic: FXN 3 forward 9:69045968-69045995; SpCas9
tgaaagtcctgaggcaacccccaa

SEQ ID NO: 45711 - DNA, 23 bp, Artificial Sequence
  Synthetic: FXN 3 forward 9:69045969-69045995; SpCas9
gaaagtcctgaggcaacccccaa

SEQ ID NO: 45712 - DNA, 22 bp, Artificial Sequence
  Synthetic: FXN 3 forward 9:69045970-69045995; SpCas9
aaagtcctgaggcaacccccaa

SEQ ID NO: 45713 - DNA, 21 bp, Artificial Sequence
  Synthetic: FXN 3 forward 9:69045971-69045995; SpCas9
aagtcctgaggcaacccccaa

SEQ ID NO: 45714 - DNA, 20 bp, Artificial Sequence
  Synthetic: FXN 3 forward 9:69045972-69045995; SpCas9
agtcctgaggcaacccccaa

SEQ ID NO: 45715 - DNA, 19 bp, Artificial Sequence
  Synthetic: FXN 3 forward 9:69045973-69045995; SpCas9
gtcctgaggcaacccccaa

SEQ ID NO: 45716 - DNA, 18 bp, Artificial Sequence
  Synthetic: FXN 3 forward 9:69045974-69045995; SpCas9
tcctgaggcaacccccaa

SEQ ID NO: 45717 - DNA, 25 bp, Artificial Sequence
  Synthetic: FXN 3 forward 9:69045970-69045998; SpCas9
aaagtcctgaggcaacccccaaggg

SEQ ID NO: 45718 - DNA, 24 bp, Artificial Sequence
  Synthetic: FXN 3 forward 9:69045971-69045998; SpCas9
aagtcctgaggcaacccccaaggg

SEQ ID NO: 45719 - DNA, 23 bp, Artificial Sequence
  Synthetic: FXN 3 forward 9:69045972-69045998; SpCas9
agtcctgaggcaacccccaaggg

SEQ ID NO: 45720 - DNA, 22 bp, Artificial Sequence
  Synthetic: FXN 3 forward 9:69045973-69045998; SpCas9
gtcctgaggcaacccccaaggg

SEQ ID NO: 45721 - DNA, 21 bp, Artificial Sequence
  Synthetic: FXN 3 forward 9:69045974-69045998; SpCas9
tcctgaggcaacccccaaggg

SEQ ID NO: 45722 - DNA, 20 bp, Artificial Sequence
  Synthetic: FXN 3 forward 9:69045975-69045998; SpCas9
cctgaggcaacccccaaggg

SEQ ID NO: 45723 - DNA, 19 bp, Artificial Sequence
  Synthetic: FXN 3 forward 9:69045976-69045998; SpCas9
ctgaggcaacccccaaggg

SEQ ID NO: 45724 - DNA, 18 bp, Artificial Sequence
  Synthetic: FXN 3 forward 9:69045977-69045998; SpCas9
tgaggcaacccccaaggg

SEQ ID NO: 45725 - DNA, 25 bp, Artificial Sequence
  Synthetic: FXN 3 forward 9:69045973-69046001; SpCas9
gtcctgaggcaacccccaagggtgg

SEQ ID NO: 45726 - DNA, 24 bp, Artificial Sequence
  Synthetic: FXN 3 forward 9:69045974-69046001; SpCas9
tcctgaggcaacccccaagggtgg

SEQ ID NO: 45727 - DNA, 23 bp, Artificial Sequence
  Synthetic: FXN 3 forward 9:69045975-69046001; SpCas9
cctgaggcaacccccaagggtgg

SEQ ID NO: 45728 - DNA, 22 bp, Artificial Sequence
  Synthetic: FXN 3 forward 9:69045976-69046001; SpCas9
ctgaggcaacccccaagggtgg

SEQ ID NO: 45729 - DNA, 21 bp, Artificial Sequence
  Synthetic: FXN 3 forward 9:69045977-69046001; SpCas9
tgaggcaacccccaagggtgg

SEQ ID NO: 45730 - DNA, 20 bp, Artificial Sequence
  Synthetic: FXN 3 forward 9:69045978-69046001; SpCas9
gaggcaacccccaagggtgg

SEQ ID NO: 45731 - DNA, 19 bp, Artificial Sequence
  Synthetic: FXN 3 forward 9:69045979-69046001; SpCas9
aggcaacccccaagggtgg

SEQ ID NO: 45732 - DNA, 18 bp, Artificial Sequence
  Synthetic: FXN 3 forward 9:69045980-69046001; SpCas9
ggcaacccccaagggtgg

SEQ ID NO: 45733 - DNA, 25 bp, Artificial Sequence
  Synthetic: FXN 3 reverse 9:69045975-69046003; SpCas9
cacttccacccttgggggttgcctc

SEQ ID NO: 45734 - DNA, 24 bp, Artificial Sequence
  Synthetic: FXN 3 reverse 9:69045976-69046003; SpCas9
acttccacccttgggggttgcctc

SEQ ID NO: 45735 - DNA, 23 bp, Artificial Sequence
  Synthetic: FXN 3 reverse 9:69045977-69046003; SpCas9
cttccacccttgggggttgcctc

SEQ ID NO: 45736 - DNA, 22 bp, Artificial Sequence
  Synthetic: FXN 3 reverse 9:69045978-69046003; SpCas9
ttccacccttgggggttgcctc

SEQ ID NO: 45737 - DNA, 21 bp, Artificial Sequence
  Synthetic: FXN 3 reverse 9:69045979-69046003; SpCas9
tccacccttgggggttgcctc

SEQ ID NO: 45738 - DNA, 20 bp, Artificial Sequence
  Synthetic: FXN 3 reverse 9:69045980-69046003; SpCas9
ccacccttgggggttgcctc

SEQ ID NO: 45739 - DNA, 19 bp, Artificial Sequence
  Synthetic: FXN 3 reverse 9:69045981-69046003; SpCas9
cacccttgggggttgcctc

SEQ ID NO: 45740 - DNA, 18 bp, Artificial Sequence
  Synthetic: FXN 3 reverse 9:69045982-69046003; SpCas9
acccttgggggttgcctc

SEQ ID NO: 45741 - DNA, 25 bp, Artificial Sequence
  Synthetic: FXN 3 reverse 9:69045976-69046004; SpCas9
gcacttccacccttgggggttgcct

SEQ ID NO: 45742 - DNA, 24 bp, Artificial Sequence
  Synthetic: FXN 3 reverse 9:69045977-69046004; SpCas9
cacttccacccttgggggttgcct

SEQ ID NO: 45743 - DNA, 23 bp, Artificial Sequence
  Synthetic: FXN 3 reverse 9:69045978-69046004; SpCas9
acttccacccttgggggttgcct

SEQ ID NO: 45744 - DNA, 22 bp, Artificial Sequence
  Synthetic: FXN 3 reverse 9:69045979-69046004; SpCas9
cttccacccttgggggttgcct

SEQ ID NO: 45745 - DNA, 21 bp, Artificial Sequence
  Synthetic: FXN 3 reverse 9:69045980-69046004; SpCas9
ttccacccttgggggttgcct

SEQ ID NO: 45746 - DNA, 20 bp, Artificial Sequence
  Synthetic: FXN 3 reverse 9:69045981-69046004; SpCas9
tccacccttgggggttgcct

SEQ ID NO: 45747 - DNA, 19 bp, Artificial Sequence
  Synthetic: FXN 3 reverse 9:69045982-69046004; SpCas9
ccacccttgggggttgcct

SEQ ID NO: 45748 - DNA, 18 bp, Artificial Sequence
  Synthetic: FXN 3 reverse 9:69045983-69046004; SpCas9
cacccttgggggttgcct

SEQ ID NO: 45749 - DNA, 25 bp, Artificial Sequence
  Synthetic: FXN 3 forward 9:69045979-69046007; SpCas9
aggcaacccccaagggtggaagtgc

SEQ ID NO: 45750 - DNA, 24 bp, Artificial Sequence
  Synthetic: FXN 3 forward 9:69045980-69046007; SpCas9
ggcaacccccaagggtggaagtgc

SEQ ID NO: 45751 - DNA, 23 bp, Artificial Sequence
  Synthetic: FXN 3 forward 9:69045981-69046007; SpCas9
gcaacccccaagggtggaagtgc

SEQ ID NO: 45752 - DNA, 22 bp, Artificial Sequence
  Synthetic: FXN 3 forward 9:69045982-69046007; SpCas9
caacccccaagggtggaagtgc

SEQ ID NO: 45753 - DNA, 21 bp, Artificial Sequence
  Synthetic: FXN 3 forward 9:69045983-69046007; SpCas9
aacccccaagggtggaagtgc

SEQ ID NO: 45754 - DNA, 20 bp, Artificial Sequence
  Synthetic: FXN 3 forward 9:69045984-69046007; SpCas9
acccccaagggtggaagtgc

SEQ ID NO: 45755 - DNA, 19 bp, Artificial Sequence
  Synthetic: FXN 3 forward 9:69045985-69046007; SpCas9
cccccaagggtggaagtgc

SEQ ID NO: 45756 - DNA, 18 bp, Artificial Sequence
  Synthetic: FXN 3 forward 9:69045986-69046007; SpCas9
ccccaagggtggaagtgc

SEQ ID NO: 45757 - DNA, 25 bp, Artificial Sequence
  Synthetic: FXN 3 forward 9:69045980-69046008; SpCas9
ggcaacccccaagggtggaagtgcc

SEQ ID NO: 45758 - DNA, 24 bp, Artificial Sequence
  Synthetic: FXN 3 forward 9:69045981-69046008; SpCas9
gcaacccccaagggtggaagtgcc

SEQ ID NO: 45759 - DNA, 23 bp, Artificial Sequence
  Synthetic: FXN 3 forward 9:69045982-69046008; SpCas9
caacccccaagggtggaagtgcc

SEQ ID NO: 45760 - DNA, 22 bp, Artificial Sequence
  Synthetic: FXN 3 forward 9:69045983-69046008; SpCas9
aacccccaagggtggaagtgcc

SEQ ID NO: 45761 - DNA, 21 bp, Artificial Sequence
  Synthetic: FXN 3 forward 9:69045984-69046008; SpCas9
acccccaagggtggaagtgcc

SEQ ID NO: 45762 - DNA, 20 bp, Artificial Sequence
  Synthetic: FXN 3 forward 9:69045985-69046008; SpCas9
cccccaagggtggaagtgcc

SEQ ID NO: 45763 - DNA, 19 bp, Artificial Sequence
  Synthetic: FXN 3 forward 9:69045986-69046008; SpCas9
ccccaagggtggaagtgcc

SEQ ID NO: 45764 - DNA, 18 bp, Artificial Sequence
  Synthetic: FXN 3 forward 9:69045987-69046008; SpCas9
cccaagggtggaagtgcc

SEQ ID NO: 45765 - DNA, 25 bp, Artificial Sequence
  Synthetic: FXN 3 reverse 9:69045985-69046013; SpCas9
ggtggcctggcacttccacccttgg

SEQ ID NO: 45766 - DNA, 24 bp, Artificial Sequence
  Synthetic: FXN 3 reverse 9:69045986-69046013; SpCas9
gtggcctggcacttccacccttgg

SEQ ID NO: 45767 - DNA, 23 bp, Artificial Sequence
  Synthetic: FXN 3 reverse 9:69045987-69046013; SpCas9
tggcctggcacttccacccttgg

SEQ ID NO: 45768 - DNA, 22 bp, Artificial Sequence
  Synthetic: FXN 3 reverse 9:69045988-69046013; SpCas9
ggcctggcacttccacccttgg

SEQ ID NO: 45769 - DNA, 21 bp, Artificial Sequence
  Synthetic: FXN 3 reverse 9:69045989-69046013; SpCas9
gcctggcacttccacccttgg

SEQ ID NO: 45770 - DNA, 20 bp, Artificial Sequence
  Synthetic: FXN 3 reverse 9:69045990-69046013; SpCas9
cctggcacttccacccttgg

SEQ ID NO: 45771 - DNA, 19 bp, Artificial Sequence
  Synthetic: FXN 3 reverse 9:69045991-69046013; SpCas9
ctggcacttccacccttgg

SEQ ID NO: 45772 - DNA, 18 bp, Artificial Sequence
  Synthetic: FXN 3 reverse 9:69045992-69046013; SpCas9
tggcacttccacccttgg

SEQ ID NO: 45773 - DNA, 25 bp, Artificial Sequence
  Synthetic: FXN 3 reverse 9:69045986-69046014; SpCas9
tggtggcctggcacttccacccttg

SEQ ID NO: 45774 - DNA, 24 bp, Artificial Sequence
  Synthetic: FXN 3 reverse 9:69045987-69046014; SpCas9
ggtggcctggcacttccacccttg

SEQ ID NO: 45775 - DNA, 23 bp, Artificial Sequence
  Synthetic: FXN 3 reverse 9:69045988-69046014; SpCas9
gtggcctggcacttccacccttg

SEQ ID NO: 45776 - DNA, 22 bp, Artificial Sequence
  Synthetic: FXN 3 reverse 9:69045989-69046014; SpCas9
tggcctggcacttccacccttg

SEQ ID NO: 45777 - DNA, 21 bp, Artificial Sequence
  Synthetic: FXN 3 reverse 9:69045990-69046014; SpCas9
ggcctggcacttccacccttg

SEQ ID NO: 45778 - DNA, 20 bp, Artificial Sequence
  Synthetic: FXN 3 reverse 9:69045991-69046014; SpCas9
gcctggcacttccacccttg

SEQ ID NO: 45779 - DNA, 19 bp, Artificial Sequence
  Synthetic: FXN 3 reverse 9:69045992-69046014; SpCas9
cctggcacttccacccttg

SEQ ID NO: 45780 - DNA, 18 bp, Artificial Sequence
  Synthetic: FXN 3 reverse 9:69045993-69046014; SpCas9
ctggcacttccacccttg

SEQ ID NO: 45781 - DNA, 25 bp, Artificial Sequence
  Synthetic: FXN 3 reverse 9:69045987-69046015; SpCas9
gtggtggcctggcacttccaccctt

SEQ ID NO: 45782 - DNA, 24 bp, Artificial Sequence
  Synthetic: FXN 3 reverse 9:69045988-69046015; SpCas9
tggtggcctggcacttccaccctt

SEQ ID NO: 45783 - DNA, 23 bp, Artificial Sequence
  Synthetic: FXN 3 reverse 9:69045989-69046015; SpCas9
ggtggcctggcacttccaccctt

SEQ ID NO: 45784 - DNA, 22 bp, Artificial Sequence
  Synthetic: FXN 3 reverse 9:69045990-69046015; SpCas9
gtggcctggcacttccaccctt

SEQ ID NO: 45785 - DNA, 21 bp, Artificial Sequence
  Synthetic: FXN 3 reverse 9:69045991-69046015; SpCas9
tggcctggcacttccaccctt

SEQ ID NO: 45786 - DNA, 20 bp, Artificial Sequence
  Synthetic: FXN 3 reverse 9:69045992-69046015; SpCas9
ggcctggcacttccaccctt

SEQ ID NO: 45787 - DNA, 19 bp, Artificial Sequence
  Synthetic: FXN 3 reverse 9:69045993-69046015; SpCas9
gcctggcacttccaccctt

SEQ ID NO: 45788 - DNA, 18 bp, Artificial Sequence
  Synthetic: FXN 3 reverse 9:69045994-69046015; SpCas9
cctggcacttccaccctt

SEQ ID NO: 45789 - DNA, 25 bp, Artificial Sequence
  Synthetic: FXN 3 reverse 9:69045988-69046016; SpCas9
ggtggtggcctggcacttccaccct

SEQ ID NO: 45790 - DNA, 24 bp, Artificial Sequence
  Synthetic: FXN 3 reverse 9:69045989-69046016; SpCas9
gtggtggcctggcacttccaccct

SEQ ID NO: 45791 - DNA, 23 bp, Artificial Sequence
  Synthetic: FXN 3 reverse 9:69045990-69046016; SpCas9
tggtggcctggcacttccaccct

SEQ ID NO: 45792 - DNA, 22 bp, Artificial Sequence
  Synthetic: FXN 3 reverse 9:69045991-69046016; SpCas9
ggtggcctggcacttccaccct

SEQ ID NO: 45793 - DNA, 21 bp, Artificial Sequence
  Synthetic: FXN 3 reverse 9:69045992-69046016; SpCas9
gtggcctggcacttccaccct

SEQ ID NO: 45794 - DNA, 20 bp, Artificial Sequence
  Synthetic: FXN 3 reverse 9:69045993-69046016; SpCas9
tggcctggcacttccaccct

SEQ ID NO: 45795 - DNA, 19 bp, Artificial Sequence
  Synthetic: FXN 3 reverse 9:69045994-69046016; SpCas9
ggcctggcacttccaccct

SEQ ID NO: 45796 - DNA, 18 bp, Artificial Sequence
  Synthetic: FXN 3 reverse 9:69045995-69046016; SpCas9
gcctggcacttccaccct

SEQ ID NO: 45797 - DNA, 25 bp, Artificial Sequence
  Synthetic: FXN 3 forward 9:69045994-69046022; SpCas9
gtggaagtgccaggccaccacccac

SEQ ID NO: 45798 - DNA, 24 bp, Artificial Sequence
  Synthetic: FXN 3 forward 9:69045995-69046022; SpCas9
tggaagtgccaggccaccacccac

SEQ ID NO: 45799 - DNA, 23 bp, Artificial Sequence
  Synthetic: FXN 3 forward 9:69045996-69046022; SpCas9
ggaagtgccaggccaccacccac

SEQ ID NO: 45800 - DNA, 22 bp, Artificial Sequence
  Synthetic: FXN 3 forward 9:69045997-69046022; SpCas9
gaagtgccaggccaccacccac

SEQ ID NO: 45801 - DNA, 21 bp, Artificial Sequence
  Synthetic: FXN 3 forward 9:69045998-69046022; SpCas9
aagtgccaggccaccacccac

SEQ ID NO: 45802 - DNA, 20 bp, Artificial Sequence
  Synthetic: FXN 3 forward 9:69045999-69046022; SpCas9
agtgccaggccaccacccac

SEQ ID NO: 45803 - DNA, 19 bp, Artificial Sequence
  Synthetic: FXN 3 forward 9:69046000-69046022; SpCas9
gtgccaggccaccacccac

SEQ ID NO: 45804 - DNA, 18 bp, Artificial Sequence
  Synthetic: FXN 3 forward 9:69046001-69046022; SpCas9
tgccaggccaccacccac

SEQ ID NO: 45805 - DNA, 25 bp, Artificial Sequence
  Synthetic: FXN 3 forward 9:69045996-69046024; SpCas9
ggaagtgccaggccaccacccactg

SEQ ID NO: 45806 - DNA, 24 bp, Artificial Sequence
  Synthetic: FXN 3 forward 9:69045997-69046024; SpCas9
gaagtgccaggccaccacccactg

SEQ ID NO: 45807 - DNA, 23 bp, Artificial Sequence
  Synthetic: FXN 3 forward 9:69045998-69046024; SpCas9
aagtgccaggccaccacccactg

SEQ ID NO: 45808 - DNA, 22 bp, Artificial Sequence
  Synthetic: FXN 3 forward 9:69045999-69046024; SpCas9
agtgccaggccaccacccactg

SEQ ID NO: 45809 - DNA, 21 bp, Artificial Sequence
  Synthetic: FXN 3 forward 9:69046000-69046024; SpCas9
gtgccaggccaccacccactg

SEQ ID NO: 45810 - DNA, 20 bp, Artificial Sequence
  Synthetic: FXN 3 forward 9:69046001-69046024; SpCas9
tgccaggccaccacccactg

SEQ ID NO: 45811 - DNA, 19 bp, Artificial Sequence
  Synthetic: FXN 3 forward 9:69046002-69046024; SpCas9
gccaggccaccacccactg

SEQ ID NO: 45812 - DNA, 18 bp, Artificial Sequence
  Synthetic: FXN 3 forward 9:69046003-69046024; SpCas9
ccaggccaccacccactg

SEQ ID NO: 45813 - DNA, 25 bp, Artificial Sequence
  Synthetic: FXN 3 forward 9:69045997-69046025; SpCas9
gaagtgccaggccaccacccactgg

SEQ ID NO: 45814 - DNA, 24 bp, Artificial Sequence
  Synthetic: FXN 3 forward 9:69045998-69046025; SpCas9
aagtgccaggccaccacccactgg

SEQ ID NO: 45815 - DNA, 23 bp, Artificial Sequence
  Synthetic: FXN 3 forward 9:69045999-69046025; SpCas9
agtgccaggccaccacccactgg

SEQ ID NO: 45816 - DNA, 22 bp, Artificial Sequence
  Synthetic: FXN 3 forward 9:69046000-69046025; SpCas9
gtgccaggccaccacccactgg

SEQ ID NO: 45817 - DNA, 21 bp, Artificial Sequence
  Synthetic: FXN 3 forward 9:69046001-69046025; SpCas9
tgccaggccaccacccactgg

SEQ ID NO: 45818 - DNA, 20 bp, Artificial Sequence
  Synthetic: FXN 3 forward 9:69046002-69046025; SpCas9
gccaggccaccacccactgg

SEQ ID NO: 45819 - DNA, 19 bp, Artificial Sequence
  Synthetic: FXN 3 forward 9:69046003-69046025; SpCas9
ccaggccaccacccactgg

SEQ ID NO: 45820 - DNA, 18 bp, Artificial Sequence
  Synthetic: FXN 3 forward 9:69046004-69046025; SpCas9
caggccaccacccactgg

SEQ ID NO: 45821 - DNA, 25 bp, Artificial Sequence
  Synthetic: FXN 3 forward 9:69046003-69046031; SpCas9
ccaggccaccacccactggaggtga

SEQ ID NO: 45822 - DNA, 24 bp, Artificial Sequence
  Synthetic: FXN 3 forward 9:69046004-69046031; SpCas9
caggccaccacccactggaggtga

SEQ ID NO: 45823 - DNA, 23 bp, Artificial Sequence
  Synthetic: FXN 3 forward 9:69046005-69046031; SpCas9
aggccaccacccactggaggtga

SEQ ID NO: 45824 - DNA, 22 bp, Artificial Sequence
  Synthetic: FXN 3 forward 9:69046006-69046031; SpCas9
ggccaccacccactggaggtga

SEQ ID NO: 45825 - DNA, 21 bp, Artificial Sequence
  Synthetic: FXN 3 forward 9:69046007-69046031; SpCas9
gccaccacccactggaggtga

SEQ ID NO: 45826 - DNA, 20 bp, Artificial Sequence
  Synthetic: FXN 3 forward 9:69046008-69046031; SpCas9
ccaccacccactggaggtga

SEQ ID NO: 45827 - DNA, 19 bp, Artificial Sequence
  Synthetic: FXN 3 forward 9:69046009-69046031; SpCas9
caccacccactggaggtga

SEQ ID NO: 45828 - DNA, 18 bp, Artificial Sequence
  Synthetic: FXN 3 forward 9:69046010-69046031; SpCas9
accacccactggaggtga

SEQ ID NO: 45829 - DNA, 25 bp, Artificial Sequence
  Synthetic: FXN 3 reverse 9:69046003-69046031; SpCas9
ctttcacctccagtgggtggtggcc

SEQ ID NO: 45830 - DNA, 24 bp, Artificial Sequence
  Synthetic: FXN 3 reverse 9:69046004-69046031; SpCas9
tttcacctccagtgggtggtggcc

SEQ ID NO: 45831 - DNA, 23 bp, Artificial Sequence
  Synthetic: FXN 3 reverse 9:69046005-69046031; SpCas9
ttcacctccagtgggtggtggcc

SEQ ID NO: 45832 - DNA, 22 bp, Artificial Sequence
  Synthetic: FXN 3 reverse 9:69046006-69046031; SpCas9
tcacctccagtgggtggtggcc

SEQ ID NO: 45833 - DNA, 21 bp, Artificial Sequence
  Synthetic: FXN 3 reverse 9:69046007-69046031; SpCas9
cacctccagtgggtggtggcc

SEQ ID NO: 45834 - DNA, 20 bp, Artificial Sequence
  Synthetic: FXN 3 reverse 9:69046008-69046031; SpCas9
acctccagtgggtggtggcc

SEQ ID NO: 45835 - DNA, 19 bp, Artificial Sequence
  Synthetic: FXN 3 reverse 9:69046009-69046031; SpCas9
cctccagtgggtggtggcc

SEQ ID NO: 45836 - DNA, 18 bp, Artificial Sequence
  Synthetic: FXN 3 reverse 9:69046010-69046031; SpCas9
ctccagtgggtggtggcc

SEQ ID NO: 45837 - DNA, 25 bp, Artificial Sequence
  Synthetic: FXN 3 reverse 9:69046008-69046036; SpCas9
cggaactttcacctccagtgggtgg

SEQ ID NO: 45838 - DNA, 24 bp, Artificial Sequence
  Synthetic: FXN 3 reverse 9:69046009-69046036; SpCas9
ggaactttcacctccagtgggtgg

SEQ ID NO: 45839 - DNA, 23 bp, Artificial Sequence
  Synthetic: FXN 3 reverse 9:69046010-69046036; SpCas9
gaactttcacctccagtgggtgg

SEQ ID NO: 45840 - DNA, 22 bp, Artificial Sequence
  Synthetic: FXN 3 reverse 9:69046011-69046036; SpCas9
aactttcacctccagtgggtgg

SEQ ID NO: 45841 - DNA, 21 bp, Artificial Sequence
  Synthetic: FXN 3 reverse 9:69046012-69046036; SpCas9
actttcacctccagtgggtgg

SEQ ID NO: 45842 - DNA, 20 bp, Artificial Sequence
  Synthetic: FXN 3 reverse 9:69046013-69046036; SpCas9
ctttcacctccagtgggtgg

SEQ ID NO: 45843 - DNA, 19 bp, Artificial Sequence
  Synthetic: FXN 3 reverse 9:69046014-69046036; SpCas9
tttcacctccagtgggtgg

SEQ ID NO: 45844 - DNA, 18 bp, Artificial Sequence
  Synthetic: FXN 3 reverse 9:69046015-69046036; SpCas9
ttcacctccagtgggtgg

SEQ ID NO: 45845 - DNA, 25 bp, Artificial Sequence
  Synthetic: FXN 3 reverse 9:69046011-69046039; SpCas9
tcacggaactttcacctccagtggg

SEQ ID NO: 45846 - DNA, 24 bp, Artificial Sequence
  Synthetic: FXN 3 reverse 9:69046012-69046039; SpCas9
cacggaactttcacctccagtggg

SEQ ID NO: 45847 - DNA, 23 bp, Artificial Sequence
  Synthetic: FXN 3 reverse 9:69046013-69046039; SpCas9
acggaactttcacctccagtggg

SEQ ID NO: 45848 - DNA, 22 bp, Artificial Sequence
  Synthetic: FXN 3 reverse 9:69046014-69046039; SpCas9
cggaactttcacctccagtggg

SEQ ID NO: 45849 - DNA, 21 bp, Artificial Sequence
  Synthetic: FXN 3 reverse 9:69046015-69046039; SpCas9
ggaactttcacctccagtggg

SEQ ID NO: 45850 - DNA, 20 bp, Artificial Sequence
  Synthetic: FXN 3 reverse 9:69046016-69046039; SpCas9
gaactttcacctccagtggg

SEQ ID NO: 45851 - DNA, 19 bp, Artificial Sequence
  Synthetic: FXN 3 reverse 9:69046017-69046039; SpCas9
aactttcacctccagtggg

SEQ ID NO: 45852 - DNA, 18 bp, Artificial Sequence
  Synthetic: FXN 3 reverse 9:69046018-69046039; SpCas9
actttcacctccagtggg

SEQ ID NO: 45853 - DNA, 25 bp, Artificial Sequence
  Synthetic: FXN 3 forward 9:69046014-69046042; SpCas9
cccactggaggtgaaagttccgtga

SEQ ID NO: 45854 - DNA, 24 bp, Artificial Sequence
  Synthetic: FXN 3 forward 9:69046015-69046042; SpCas9
ccactggaggtgaaagttccgtga

SEQ ID NO: 45855 - DNA, 23 bp, Artificial Sequence
  Synthetic: FXN 3 forward 9:69046016-69046042; SpCas9
cactggaggtgaaagttccgtga

SEQ ID NO: 45856 - DNA, 22 bp, Artificial Sequence
  Synthetic: FXN 3 forward 9:69046017-69046042; SpCas9
actggaggtgaaagttccgtga

SEQ ID NO: 45857 - DNA, 21 bp, Artificial Sequence
  Synthetic: FXN 3 forward 9:69046018-69046042; SpCas9
ctggaggtgaaagttccgtga

SEQ ID NO: 45858 - DNA, 20 bp, Artificial Sequence
  Synthetic: FXN 3 forward 9:69046019-69046042; SpCas9
tggaggtgaaagttccgtga

SEQ ID NO: 45859 - DNA, 19 bp, Artificial Sequence
  Synthetic: FXN 3 forward 9:69046020-69046042; SpCas9
ggaggtgaaagttccgtga

SEQ ID NO: 45860 - DNA, 18 bp, Artificial Sequence
  Synthetic: FXN 3 forward 9:69046021-69046042; SpCas9
gaggtgaaagttccgtga

SEQ ID NO: 45861 - DNA, 25 bp, Artificial Sequence
  Synthetic: FXN 3 reverse 9:69046014-69046042; SpCas9
ccatcacggaactttcacctccagt

SEQ ID NO: 45862 - DNA, 24 bp, Artificial Sequence
  Synthetic: FXN 3 reverse 9:69046015-69046042; SpCas9
catcacggaactttcacctccagt

SEQ ID NO: 45863 - DNA, 23 bp, Artificial Sequence
  Synthetic: FXN 3 reverse 9:69046016-69046042; SpCas9
atcacggaactttcacctccagt

SEQ ID NO: 45864 - DNA, 22 bp, Artificial Sequence
  Synthetic: FXN 3 reverse 9:69046017-69046042; SpCas9
tcacggaactttcacctccagt

SEQ ID NO: 45865 - DNA, 21 bp, Artificial Sequence
  Synthetic: FXN 3 reverse 9:69046018-69046042; SpCas9
cacggaactttcacctccagt

SEQ ID NO: 45866 - DNA, 20 bp, Artificial Sequence
  Synthetic: FXN 3 reverse 9:69046019-69046042; SpCas9
acggaactttcacctccagt

SEQ ID NO: 45867 - DNA, 19 bp, Artificial Sequence
  Synthetic: FXN 3 reverse 9:69046020-69046042; SpCas9
cggaactttcacctccagt

SEQ ID NO: 45868 - DNA, 18 bp, Artificial Sequence
  Synthetic: FXN 3 reverse 9:69046021-69046042; SpCas9
ggaactttcacctccagt

SEQ ID NO: 45869 - DNA, 25 bp, Artificial Sequence
  Synthetic: FXN 3 forward 9:69046015-69046043; SpCas9
ccactggaggtgaaagttccgtgat

SEQ ID NO: 45870 - DNA, 24 bp, Artificial Sequence
  Synthetic: FXN 3 forward 9:69046016-69046043; SpCas9
cactggaggtgaaagttccgtgat

SEQ ID NO: 45871 - DNA, 23 bp, Artificial Sequence
  Synthetic: FXN 3 forward 9:69046017-69046043; SpCas9
actggaggtgaaagttccgtgat

SEQ ID NO: 45872 - DNA, 22 bp, Artificial Sequence
  Synthetic: FXN 3 forward 9:69046018-69046043; SpCas9
ctggaggtgaaagttccgtgat

SEQ ID NO: 45873 - DNA, 21 bp, Artificial Sequence
  Synthetic: FXN 3 forward 9:69046019-69046043; SpCas9
tggaggtgaaagttccgtgat

SEQ ID NO: 45874 - DNA, 20 bp, Artificial Sequence
  Synthetic: FXN 3 forward 9:69046020-69046043; SpCas9
ggaggtgaaagttccgtgat

SEQ ID NO: 45875 - DNA, 19 bp, Artificial Sequence
  Synthetic: FXN 3 forward 9:69046021-69046043; SpCas9
gaggtgaaagttccgtgat

SEQ ID NO: 45876 - DNA, 18 bp, Artificial Sequence
  Synthetic: FXN 3 forward 9:69046022-69046043; SpCas9
aggtgaaagttccgtgat

SEQ ID NO: 45877 - DNA, 25 bp, Artificial Sequence
  Synthetic: FXN 3 reverse 9:69046015-69046043; SpCas9
cccatcacggaactttcacctccag

SEQ ID NO: 45878 - DNA, 24 bp, Artificial Sequence
  Synthetic: FXN 3 reverse 9:69046016-69046043; SpCas9
ccatcacggaactttcacctccag

SEQ ID NO: 45879 - DNA, 23 bp, Artificial Sequence
  Synthetic: FXN 3 reverse 9:69046017-69046043; SpCas9
catcacggaactttcacctccag

SEQ ID NO: 45880 - DNA, 22 bp, Artificial Sequence
  Synthetic: FXN 3 reverse 9:69046018-69046043; SpCas9
atcacggaactttcacctccag

SEQ ID NO: 45881 - DNA, 21 bp, Artificial Sequence
  Synthetic: FXN 3 reverse 9:69046019-69046043; SpCas9
tcacggaactttcacctccag

SEQ ID NO: 45882 - DNA, 20 bp, Artificial Sequence
  Synthetic: FXN 3 reverse 9:69046020-69046043; SpCas9
cacggaactttcacctccag

SEQ ID NO: 45883 - DNA, 19 bp, Artificial Sequence
  Synthetic: FXN 3 reverse 9:69046021-69046043; SpCas9
acggaactttcacctccag

SEQ ID NO: 45884 - DNA, 18 bp, Artificial Sequence
  Synthetic: FXN 3 reverse 9:69046022-69046043; SpCas9
cggaactttcacctccag

SEQ ID NO: 45885 - DNA, 25 bp, Artificial Sequence
  Synthetic: FXN 3 reverse 9:69046018-69046046; SpCas9
aaacccatcacggaactttcacctc

SEQ ID NO: 45886 - DNA, 24 bp, Artificial Sequence
  Synthetic: FXN 3 reverse 9:69046019-69046046; SpCas9
aacccatcacggaactttcacctc

SEQ ID NO: 45887 - DNA, 23 bp, Artificial Sequence
  Synthetic: FXN 3 reverse 9:69046020-69046046; SpCas9
acccatcacggaactttcacctc

SEQ ID NO: 45888 - DNA, 22 bp, Artificial Sequence
  Synthetic: FXN 3 reverse 9:69046021-69046046; SpCas9
cccatcacggaactttcacctc

SEQ ID NO: 45889 - DNA, 21 bp, Artificial Sequence
  Synthetic: FXN 3 reverse 9:69046022-69046046; SpCas9
ccatcacggaactttcacctc

SEQ ID NO: 45890 - DNA, 20 bp, Artificial Sequence
  Synthetic: FXN 3 reverse 9:69046023-69046046; SpCas9
catcacggaactttcacctc

SEQ ID NO: 45891 - DNA, 19 bp, Artificial Sequence
  Synthetic: FXN 3 reverse 9:69046024-69046046; SpCas9
atcacggaactttcacctc

SEQ ID NO: 45892 - DNA, 18 bp, Artificial Sequence
  Synthetic: FXN 3 reverse 9:69046025-69046046; SpCas9
tcacggaactttcacctc

SEQ ID NO: 45893 - DNA, 25 bp, Artificial Sequence
  Synthetic: FXN 3 forward 9:69046025-69046053; SpCas9
tgaaagttccgtgatgggtttgctt

SEQ ID NO: 45894 - DNA, 24 bp, Artificial Sequence
  Synthetic: FXN 3 forward 9:69046026-69046053; SpCas9
gaaagttccgtgatgggtttgctt

SEQ ID NO: 45895 - DNA, 23 bp, Artificial Sequence
  Synthetic: FXN 3 forward 9:69046027-69046053; SpCas9
aaagttccgtgatgggtttgctt

SEQ ID NO: 45896 - DNA, 22 bp, Artificial Sequence
  Synthetic: FXN 3 forward 9:69046028-69046053; SpCas9
aagttccgtgatgggtttgctt

SEQ ID NO: 45897 - DNA, 21 bp, Artificial Sequence
  Synthetic: FXN 3 forward 9:69046029-69046053; SpCas9
agttccgtgatgggtttgctt

SEQ ID NO: 45898 - DNA, 20 bp, Artificial Sequence
  Synthetic: FXN 3 forward 9:69046030-69046053; SpCas9
gttccgtgatgggtttgctt

SEQ ID NO: 45899 - DNA, 19 bp, Artificial Sequence
  Synthetic: FXN 3 forward 9:69046031-69046053; SpCas9
ttccgtgatgggtttgctt

SEQ ID NO: 45900 - DNA, 18 bp, Artificial Sequence
  Synthetic: FXN 3 forward 9:69046032-69046053; SpCas9
tccgtgatgggtttgctt

SEQ ID NO: 45901 - DNA, 25 bp, Artificial Sequence
  Synthetic: FXN 3 reverse 9:69046033-69046061; SpCas9
ttcgcagaccaaagcaaacccatca

SEQ ID NO: 45902 - DNA, 24 bp, Artificial Sequence
  Synthetic: FXN 3 reverse 9:69046034-69046061; SpCas9
tcgcagaccaaagcaaacccatca

SEQ ID NO: 45903 - DNA, 23 bp, Artificial Sequence
  Synthetic: FXN 3 reverse 9:69046035-69046061; SpCas9
cgcagaccaaagcaaacccatca

SEQ ID NO: 45904 - DNA, 22 bp, Artificial Sequence
  Synthetic: FXN 3 reverse 9:69046036-69046061; SpCas9
gcagaccaaagcaaacccatca

SEQ ID NO: 45905 - DNA, 21 bp, Artificial Sequence
  Synthetic: FXN 3 reverse 9:69046037-69046061; SpCas9
cagaccaaagcaaacccatca

SEQ ID NO: 45906 - DNA, 20 bp, Artificial Sequence
  Synthetic: FXN 3 reverse 9:69046038-69046061; SpCas9
agaccaaagcaaacccatca

SEQ ID NO: 45907 - DNA, 19 bp, Artificial Sequence
  Synthetic: FXN 3 reverse 9:69046039-69046061; SpCas9
gaccaaagcaaacccatca

SEQ ID NO: 45908 - DNA, 18 bp, Artificial Sequence
  Synthetic: FXN 3 reverse 9:69046040-69046061; SpCas9
accaaagcaaacccatca

SEQ ID NO: 45909 - DNA, 25 bp, Artificial Sequence
  Synthetic: FXN 3 reverse 9:69046047-69046075; SpCas9
cacatgacagtagattcgcagacca

SEQ ID NO: 45910 - DNA, 24 bp, Artificial Sequence
  Synthetic: FXN 3 reverse 9:69046048-69046075; SpCas9
acatgacagtagattcgcagacca

SEQ ID NO: 45911 - DNA, 23 bp, Artificial Sequence
  Synthetic: FXN 3 reverse 9:69046049-69046075; SpCas9
catgacagtagattcgcagacca

SEQ ID NO: 45912 - DNA, 22 bp, Artificial Sequence
  Synthetic: FXN 3 reverse 9:69046050-69046075; SpCas9
atgacagtagattcgcagacca

SEQ ID NO: 45913 - DNA, 21 bp, Artificial Sequence
  Synthetic: FXN 3 reverse 9:69046051-69046075; SpCas9
tgacagtagattcgcagacca

SEQ ID NO: 45914 - DNA, 20 bp, Artificial Sequence
  Synthetic: FXN 3 reverse 9:69046052-69046075; SpCas9
gacagtagattcgcagacca

SEQ ID NO: 45915 - DNA, 19 bp, Artificial Sequence
  Synthetic: FXN 3 reverse 9:69046053-69046075; SpCas9
acagtagattcgcagacca

SEQ ID NO: 45916 - DNA, 18 bp, Artificial Sequence
  Synthetic: FXN 3 reverse 9:69046054-69046075; SpCas9
cagtagattcgcagacca

SEQ ID NO: 45917 - DNA, 25 bp, Artificial Sequence
  Synthetic: FXN 3 forward 9:69046048-69046076; SpCas9
tttggtctgcgaatctactgtcatg

SEQ ID NO: 45918 - DNA, 24 bp, Artificial Sequence
  Synthetic: FXN 3 forward 9:69046049-69046076; SpCas9
ttggtctgcgaatctactgtcatg

SEQ ID NO: 45919 - DNA, 23 bp, Artificial Sequence
  Synthetic: FXN 3 forward 9:69046050-69046076; SpCas9
tggtctgcgaatctactgtcatg

SEQ ID NO: 45920 - DNA, 22 bp, Artificial Sequence
  Synthetic: FXN 3 forward 9:69046051-69046076; SpCas9
ggtctgcgaatctactgtcatg

SEQ ID NO: 45921 - DNA, 21 bp, Artificial Sequence
  Synthetic: FXN 3 forward 9:69046052-69046076; SpCas9
gtctgcgaatctactgtcatg

SEQ ID NO: 45922 - DNA, 20 bp, Artificial Sequence
  Synthetic: FXN 3 forward 9:69046053-69046076; SpCas9
tctgcgaatctactgtcatg

SEQ ID NO: 45923 - DNA, 19 bp, Artificial Sequence
  Synthetic: FXN 3 forward 9:69046054-69046076; SpCas9
ctgcgaatctactgtcatg

SEQ ID NO: 45924 - DNA, 18 bp, Artificial Sequence
  Synthetic: FXN 3 forward 9:69046055-69046076; SpCas9
tgcgaatctactgtcatg

SEQ ID NO: 45925 - DNA, 25 bp, Artificial Sequence
  Synthetic: FXN 3 forward 9:69046050-69046078; SpCas9
tggtctgcgaatctactgtcatgtg

SEQ ID NO: 45926 - DNA, 24 bp, Artificial Sequence
  Synthetic: FXN 3 forward 9:69046051-69046078; SpCas9
ggtctgcgaatctactgtcatgtg

SEQ ID NO: 45927 - DNA, 23 bp, Artificial Sequence
  Synthetic: FXN 3 forward 9:69046052-69046078; SpCas9
gtctgcgaatctactgtcatgtg

SEQ ID NO: 45928 - DNA, 22 bp, Artificial Sequence
  Synthetic: FXN 3 forward 9:69046053-69046078; SpCas9
tctgcgaatctactgtcatgtg

SEQ ID NO: 45929 - DNA, 21 bp, Artificial Sequence
  Synthetic: FXN 3 forward 9:69046054-69046078; SpCas9
ctgcgaatctactgtcatgtg

SEQ ID NO: 45930 - DNA, 20 bp, Artificial Sequence
  Synthetic: FXN 3 forward 9:69046055-69046078; SpCas9
tgcgaatctactgtcatgtg

SEQ ID NO: 45931 - DNA, 19 bp, Artificial Sequence
  Synthetic: FXN 3 forward 9:69046056-69046078; SpCas9
gcgaatctactgtcatgtg

SEQ ID NO: 45932 - DNA, 18 bp, Artificial Sequence
  Synthetic: FXN 3 forward 9:69046057-69046078; SpCas9
cgaatctactgtcatgtg

SEQ ID NO: 45933 - DNA, 25 bp, Artificial Sequence
  Synthetic: FXN 3 forward 9:69046052-69046080; SpCas9
gtctgcgaatctactgtcatgtgga

SEQ ID NO: 45934 - DNA, 24 bp, Artificial Sequence
  Synthetic: FXN 3 forward 9:69046053-69046080; SpCas9
tctgcgaatctactgtcatgtgga

SEQ ID NO: 45935 - DNA, 23 bp, Artificial Sequence
  Synthetic: FXN 3 forward 9:69046054-69046080; SpCas9
ctgcgaatctactgtcatgtgga

SEQ ID NO: 45936 - DNA, 22 bp, Artificial Sequence
  Synthetic: FXN 3 forward 9:69046055-69046080; SpCas9
tgcgaatctactgtcatgtgga

SEQ ID NO: 45937 - DNA, 21 bp, Artificial Sequence
  Synthetic: FXN 3 forward 9:69046056-69046080; SpCas9
gcgaatctactgtcatgtgga

SEQ ID NO: 45938 - DNA, 20 bp, Artificial Sequence
  Synthetic: FXN 3 forward 9:69046057-69046080; SpCas9
cgaatctactgtcatgtgga

SEQ ID NO: 45939 - DNA, 19 bp, Artificial Sequence
  Synthetic: FXN 3 forward 9:69046058-69046080; SpCas9
gaatctactgtcatgtgga

SEQ ID NO: 45940 - DNA, 18 bp, Artificial Sequence
  Synthetic: FXN 3 forward 9:69046059-69046080; SpCas9
aatctactgtcatgtgga

SEQ ID NO: 45941 - DNA, 25 bp, Artificial Sequence
  Synthetic: FXN 3 reverse 9:69046054-69046082; SpCas9
atctctccacatgacagtagattcg

SEQ ID NO: 45942 - DNA, 24 bp, Artificial Sequence
  Synthetic: FXN 3 reverse 9:69046055-69046082; SpCas9
tctctccacatgacagtagattcg

SEQ ID NO: 45943 - DNA, 23 bp, Artificial Sequence
  Synthetic: FXN 3 reverse 9:69046056-69046082; SpCas9
ctctccacatgacagtagattcg

SEQ ID NO: 45944 - DNA, 22 bp, Artificial Sequence
  Synthetic: FXN 3 reverse 9:69046057-69046082; SpCas9
tctccacatgacagtagattcg

SEQ ID NO: 45945 - DNA, 21 bp, Artificial Sequence
  Synthetic: FXN 3 reverse 9:69046058-69046082; SpCas9
ctccacatgacagtagattcg

SEQ ID NO: 45946 - DNA, 20 bp, Artificial Sequence
  Synthetic: FXN 3 reverse 9:69046059-69046082; SpCas9
tccacatgacagtagattcg

SEQ ID NO: 45947 - DNA, 19 bp, Artificial Sequence
  Synthetic: FXN 3 reverse 9:69046060-69046082; SpCas9
ccacatgacagtagattcg

SEQ ID NO: 45948 - DNA, 18 bp, Artificial Sequence
  Synthetic: FXN 3 reverse 9:69046061-69046082; SpCas9
cacatgacagtagattcg

SEQ ID NO: 45949 - DNA, 25 bp, Artificial Sequence
  Synthetic: FXN 3 reverse 9:69046062-69046090; SpCas9
gagcacagatctctccacatgacag

SEQ ID NO: 45950 - DNA, 24 bp, Artificial Sequence
  Synthetic: FXN 3 reverse 9:69046063-69046090; SpCas9
agcacagatctctccacatgacag

SEQ ID NO: 45951 - DNA, 23 bp, Artificial Sequence
  Synthetic: FXN 3 reverse 9:69046064-69046090; SpCas9
gcacagatctctccacatgacag

SEQ ID NO: 45952 - DNA, 22 bp, Artificial Sequence
  Synthetic: FXN 3 reverse 9:69046065-69046090; SpCas9
cacagatctctccacatgacag

SEQ ID NO: 45953 - DNA, 21 bp, Artificial Sequence
  Synthetic: FXN 3 reverse 9:69046066-69046090; SpCas9
acagatctctccacatgacag

SEQ ID NO: 45954 - DNA, 20 bp, Artificial Sequence
  Synthetic: FXN 3 reverse 9:69046067-69046090; SpCas9
cagatctctccacatgacag

SEQ ID NO: 45955 - DNA, 19 bp, Artificial Sequence
  Synthetic: FXN 3 reverse 9:69046068-69046090; SpCas9
agatctctccacatgacag

SEQ ID NO: 45956 - DNA, 18 bp, Artificial Sequence
  Synthetic: FXN 3 reverse 9:69046069-69046090; SpCas9
gatctctccacatgacag

SEQ ID NO: 45957 - DNA, 25 bp, Artificial Sequence
  Synthetic: FXN 3 forward 9:69046065-69046093; SpCas9
ctgtcatgtggagagatctgtgctc

SEQ ID NO: 45958 - DNA, 24 bp, Artificial Sequence
  Synthetic: FXN 3 forward 9:69046066-69046093; SpCas9
tgtcatgtggagagatctgtgctc

SEQ ID NO: 45959 - DNA, 23 bp, Artificial Sequence
  Synthetic: FXN 3 forward 9:69046067-69046093; SpCas9
gtcatgtggagagatctgtgctc

SEQ ID NO: 45960 - DNA, 22 bp, Artificial Sequence
  Synthetic: FXN 3 forward 9:69046068-69046093; SpCas9
tcatgtggagagatctgtgctc

SEQ ID NO: 45961 - DNA, 21 bp, Artificial Sequence
  Synthetic: FXN 3 forward 9:69046069-69046093; SpCas9
catgtggagagatctgtgctc

SEQ ID NO: 45962 - DNA, 20 bp, Artificial Sequence
  Synthetic: FXN 3 forward 9:69046070-69046093; SpCas9
atgtggagagatctgtgctc

SEQ ID NO: 45963 - DNA, 19 bp, Artificial Sequence
  Synthetic: FXN 3 forward 9:69046071-69046093; SpCas9
tgtggagagatctgtgctc

SEQ ID NO: 45964 - DNA, 18 bp, Artificial Sequence
  Synthetic: FXN 3 forward 9:69046072-69046093; SpCas9
gtggagagatctgtgctc

SEQ ID NO: 45965 - DNA, 25 bp, Artificial Sequence
  Synthetic: FXN 3 reverse 9:69046065-69046093; SpCas9
ccagagcacagatctctccacatga

SEQ ID NO: 45966 - DNA, 24 bp, Artificial Sequence
  Synthetic: FXN 3 reverse 9:69046066-69046093; SpCas9
cagagcacagatctctccacatga

SEQ ID NO: 45967 - DNA, 23 bp, Artificial Sequence
  Synthetic: FXN 3 reverse 9:69046067-69046093; SpCas9
agagcacagatctctccacatga

SEQ ID NO: 45968 - DNA, 22 bp, Artificial Sequence
  Synthetic: FXN 3 reverse 9:69046068-69046093; SpCas9
gagcacagatctctccacatga

SEQ ID NO: 45969 - DNA, 21 bp, Artificial Sequence
  Synthetic: FXN 3 reverse 9:69046069-69046093; SpCas9
agcacagatctctccacatga

SEQ ID NO: 45970 - DNA, 20 bp, Artificial Sequence
  Synthetic: FXN 3 reverse 9:69046070-69046093; SpCas9
gcacagatctctccacatga

SEQ ID NO: 45971 - DNA, 19 bp, Artificial Sequence
  Synthetic: FXN 3 reverse 9:69046071-69046093; SpCas9
cacagatctctccacatga

SEQ ID NO: 45972 - DNA, 18 bp, Artificial Sequence
  Synthetic: FXN 3 reverse 9:69046072-69046093; SpCas9
acagatctctccacatga

SEQ ID NO: 45973 - DNA, 25 bp, Artificial Sequence
  Synthetic: FXN 3 forward 9:69046068-69046096; SpCas9
tcatgtggagagatctgtgctctgg

SEQ ID NO: 45974 - DNA, 24 bp, Artificial Sequence
  Synthetic: FXN 3 forward 9:69046069-69046096; SpCas9
catgtggagagatctgtgctctgg

SEQ ID NO: 45975 - DNA, 23 bp, Artificial Sequence
  Synthetic: FXN 3 forward 9:69046070-69046096; SpCas9
atgtggagagatctgtgctctgg

SEQ ID NO: 45976 - DNA, 22 bp, Artificial Sequence
  Synthetic: FXN 3 forward 9:69046071-69046096; SpCas9
tgtggagagatctgtgctctgg

SEQ ID NO: 45977 - DNA, 21 bp, Artificial Sequence
  Synthetic: FXN 3 forward 9:69046072-69046096; SpCas9
gtggagagatctgtgctctgg

SEQ ID NO: 45978 - DNA, 20 bp, Artificial Sequence
  Synthetic: FXN 3 forward 9:69046073-69046096; SpCas9
tggagagatctgtgctctgg

SEQ ID NO: 45979 - DNA, 19 bp, Artificial Sequence
  Synthetic: FXN 3 forward 9:69046074-69046096; SpCas9
ggagagatctgtgctctgg

SEQ ID NO: 45980 - DNA, 18 bp, Artificial Sequence
  Synthetic: FXN 3 forward 9:69046075-69046096; SpCas9
gagagatctgtgctctgg

SEQ ID NO: 45981 - DNA, 25 bp, Artificial Sequence
  Synthetic: FXN 3 forward 9:69046070-69046098; SpCas9
atgtggagagatctgtgctctggaa

SEQ ID NO: 45982 - DNA, 24 bp, Artificial Sequence
  Synthetic: FXN 3 forward 9:69046071-69046098; SpCas9
tgtggagagatctgtgctctggaa

SEQ ID NO: 45983 - DNA, 23 bp, Artificial Sequence
  Synthetic: FXN 3 forward 9:69046072-69046098; SpCas9
gtggagagatctgtgctctggaa

SEQ ID NO: 45984 - DNA, 22 bp, Artificial Sequence
  Synthetic: FXN 3 forward 9:69046073-69046098; SpCas9
tggagagatctgtgctctggaa

SEQ ID NO: 45985 - DNA, 21 bp, Artificial Sequence
  Synthetic: FXN 3 forward 9:69046074-69046098; SpCas9
ggagagatctgtgctctggaa

SEQ ID NO: 45986 - DNA, 20 bp, Artificial Sequence
  Synthetic: FXN 3 forward 9:69046075-69046098; SpCas9
gagagatctgtgctctggaa

SEQ ID NO: 45987 - DNA, 19 bp, Artificial Sequence
  Synthetic: FXN 3 forward 9:69046076-69046098; SpCas9
agagatctgtgctctggaa

SEQ ID NO: 45988 - DNA, 18 bp, Artificial Sequence
  Synthetic: FXN 3 forward 9:69046077-69046098; SpCas9
gagatctgtgctctggaa

SEQ ID NO: 45989 - DNA, 25 bp, Artificial Sequence
  Synthetic: FXN 3 forward 9:69046077-69046105; SpCas9
gagatctgtgctctggaagagcata

SEQ ID NO: 45990 - DNA, 24 bp, Artificial Sequence
  Synthetic: FXN 3 forward 9:69046078-69046105; SpCas9
agatctgtgctctggaagagcata

SEQ ID NO: 45991 - DNA, 23 bp, Artificial Sequence
  Synthetic: FXN 3 forward 9:69046079-69046105; SpCas9
gatctgtgctctggaagagcata

SEQ ID NO: 45992 - DNA, 22 bp, Artificial Sequence
  Synthetic: FXN 3 forward 9:69046080-69046105; SpCas9
atctgtgctctggaagagcata

SEQ ID NO: 45993 - DNA, 21 bp, Artificial Sequence
  Synthetic: FXN 3 forward 9:69046081-69046105; SpCas9
tctgtgctctggaagagcata

SEQ ID NO: 45994 - DNA, 20 bp, Artificial Sequence
  Synthetic: FXN 3 forward 9:69046082-69046105; SpCas9
ctgtgctctggaagagcata

SEQ ID NO: 45995 - DNA, 19 bp, Artificial Sequence
  Synthetic: FXN 3 forward 9:69046083-69046105; SpCas9
tgtgctctggaagagcata

SEQ ID NO: 45996 - DNA, 18 bp, Artificial Sequence
  Synthetic: FXN 3 forward 9:69046084-69046105; SpCas9
gtgctctggaagagcata

SEQ ID NO: 45997 - DNA, 25 bp, Artificial Sequence
  Synthetic: FXN 3 forward 9:69046081-69046109; SpCas9
tctgtgctctggaagagcatacagt

SEQ ID NO: 45998 - DNA, 24 bp, Artificial Sequence
  Synthetic: FXN 3 forward 9:69046082-69046109; SpCas9
ctgtgctctggaagagcatacagt

SEQ ID NO: 45999 - DNA, 23 bp, Artificial Sequence
  Synthetic: FXN 3 forward 9:69046083-69046109; SpCas9
tgtgctctggaagagcatacagt

SEQ ID NO: 46000 - DNA, 22 bp, Artificial Sequence
  Synthetic: FXN 3 forward 9:69046084-69046109; SpCas9
gtgctctggaagagcatacagt

SEQ ID NO: 46001 - DNA, 21 bp, Artificial Sequence
  Synthetic: FXN 3 forward 9:69046085-69046109; SpCas9
tgctctggaagagcatacagt

SEQ ID NO: 46002 - DNA, 20 bp, Artificial Sequence
  Synthetic: FXN 3 forward 9:69046086-69046109; SpCas9
gctctggaagagcatacagt

SEQ ID NO: 46003 - DNA, 19 bp, Artificial Sequence
  Synthetic: FXN 3 forward 9:69046087-69046109; SpCas9
ctctggaagagcatacagt

SEQ ID NO: 46004 - DNA, 18 bp, Artificial Sequence
  Synthetic: FXN 3 forward 9:69046088-69046109; SpCas9
tctggaagagcatacagt

SEQ ID NO: 46005 - DNA, 25 bp, Artificial Sequence
  Synthetic: FXN 3 reverse 9:69046082-69046110; SpCas9
tctaactgtatgctcttccagagca

SEQ ID NO: 46006 - DNA, 24 bp, Artificial Sequence
  Synthetic: FXN 3 reverse 9:69046083-69046110; SpCas9
ctaactgtatgctcttccagagca

SEQ ID NO: 46007 - DNA, 23 bp, Artificial Sequence
  Synthetic: FXN 3 reverse 9:69046084-69046110; SpCas9
taactgtatgctcttccagagca

SEQ ID NO: 46008 - DNA, 22 bp, Artificial Sequence
  Synthetic: FXN 3 reverse 9:69046085-69046110; SpCas9
aactgtatgctcttccagagca

SEQ ID NO: 46009 - DNA, 21 bp, Artificial Sequence
  Synthetic: FXN 3 reverse 9:69046086-69046110; SpCas9
actgtatgctcttccagagca

SEQ ID NO: 46010 - DNA, 20 bp, Artificial Sequence
  Synthetic: FXN 3 reverse 9:69046087-69046110; SpCas9
ctgtatgctcttccagagca

SEQ ID NO: 46011 - DNA, 19 bp, Artificial Sequence
  Synthetic: FXN 3 reverse 9:69046088-69046110; SpCas9
tgtatgctcttccagagca

SEQ ID NO: 46012 - DNA, 18 bp, Artificial Sequence
  Synthetic: FXN 3 reverse 9:69046089-69046110; SpCas9
gtatgctcttccagagca

SEQ ID NO: 46013 - DNA, 25 bp, Artificial Sequence
  Synthetic: FXN 3 forward 9:69046086-69046114; SpCas9
gctctggaagagcatacagttagaa

SEQ ID NO: 46014 - DNA, 24 bp, Artificial Sequence
  Synthetic: FXN 3 forward 9:69046087-69046114; SpCas9
ctctggaagagcatacagttagaa

SEQ ID NO: 46015 - DNA, 23 bp, Artificial Sequence
  Synthetic: FXN 3 forward 9:69046088-69046114; SpCas9
tctggaagagcatacagttagaa

SEQ ID NO: 46016 - DNA, 22 bp, Artificial Sequence
  Synthetic: FXN 3 forward 9:69046089-69046114; SpCas9
ctggaagagcatacagttagaa

SEQ ID NO: 46017 - DNA, 21 bp, Artificial Sequence
  Synthetic: FXN 3 forward 9:69046090-69046114; SpCas9
tggaagagcatacagttagaa

SEQ ID NO: 46018 - DNA, 20 bp, Artificial Sequence
  Synthetic: FXN 3 forward 9:69046091-69046114; SpCas9
ggaagagcatacagttagaa

SEQ ID NO: 46019 - DNA, 19 bp, Artificial Sequence
  Synthetic: FXN 3 forward 9:69046092-69046114; SpCas9
gaagagcatacagttagaa

SEQ ID NO: 46020 - DNA, 18 bp, Artificial Sequence
  Synthetic: FXN 3 forward 9:69046093-69046114; SpCas9
aagagcatacagttagaa

SEQ ID NO: 46021 - DNA, 25 bp, Artificial Sequence
  Synthetic: FXN 3 reverse 9:69046087-69046115; SpCas9
gcttttctaactgtatgctcttcca

SEQ ID NO: 46022 - DNA, 24 bp, Artificial Sequence
  Synthetic: FXN 3 reverse 9:69046088-69046115; SpCas9
cttttctaactgtatgctcttcca

SEQ ID NO: 46023 - DNA, 23 bp, Artificial Sequence
  Synthetic: FXN 3 reverse 9:69046089-69046115; SpCas9
ttttctaactgtatgctcttcca

SEQ ID NO: 46024 - DNA, 22 bp, Artificial Sequence
  Synthetic: FXN 3 reverse 9:69046090-69046115; SpCas9
tttctaactgtatgctcttcca

SEQ ID NO: 46025 - DNA, 21 bp, Artificial Sequence
  Synthetic: FXN 3 reverse 9:69046091-69046115; SpCas9
ttctaactgtatgctcttcca

SEQ ID NO: 46026 - DNA, 20 bp, Artificial Sequence
  Synthetic: FXN 3 reverse 9:69046092-69046115; SpCas9
tctaactgtatgctcttcca

SEQ ID NO: 46027 - DNA, 19 bp, Artificial Sequence
  Synthetic: FXN 3 reverse 9:69046093-69046115; SpCas9
ctaactgtatgctcttcca

SEQ ID NO: 46028 - DNA, 18 bp, Artificial Sequence
  Synthetic: FXN 3 reverse 9:69046094-69046115; SpCas9
taactgtatgctcttcca

SEQ ID NO: 46029 - DNA, 25 bp, Artificial Sequence
  Synthetic: FXN 3 reverse 9:69046089-69046117; SpCas9
aagcttttctaactgtatgctcttc

SEQ ID NO: 46030 - DNA, 24 bp, Artificial Sequence
  Synthetic: FXN 3 reverse 9:69046090-69046117; SpCas9
agcttttctaactgtatgctcttc

SEQ ID NO: 46031 - DNA, 23 bp, Artificial Sequence
  Synthetic: FXN 3 reverse 9:69046091-69046117; SpCas9
gcttttctaactgtatgctcttc

SEQ ID NO: 46032 - DNA, 22 bp, Artificial Sequence
  Synthetic: FXN 3 reverse 9:69046092-69046117; SpCas9
cttttctaactgtatgctcttc

SEQ ID NO: 46033 - DNA, 21 bp, Artificial Sequence
  Synthetic: FXN 3 reverse 9:69046093-69046117; SpCas9
ttttctaactgtatgctcttc

SEQ ID NO: 46034 - DNA, 20 bp, Artificial Sequence
  Synthetic: FXN 3 reverse 9:69046094-69046117; SpCas9
tttctaactgtatgctcttc

SEQ ID NO: 46035 - DNA, 19 bp, Artificial Sequence
  Synthetic: FXN 3 reverse 9:69046095-69046117; SpCas9
ttctaactgtatgctcttc

SEQ ID NO: 46036 - DNA, 18 bp, Artificial Sequence
  Synthetic: FXN 3 reverse 9:69046096-69046117; SpCas9
tctaactgtatgctcttc

SEQ ID NO: 46037 - DNA, 25 bp, Artificial Sequence
  Synthetic: FXN 3 forward 9:69046098-69046126; SpCas9
catacagttagaaaagcttgccctg

SEQ ID NO: 46038 - DNA, 24 bp, Artificial Sequence
  Synthetic: FXN 3 forward 9:69046099-69046126; SpCas9
atacagttagaaaagcttgccctg

SEQ ID NO: 46039 - DNA, 23 bp, Artificial Sequence
  Synthetic: FXN 3 forward 9:69046100-69046126; SpCas9
tacagttagaaaagcttgccctg

SEQ ID NO: 46040 - DNA, 22 bp, Artificial Sequence
  Synthetic: FXN 3 forward 9:69046101-69046126; SpCas9
acagttagaaaagcttgccctg

SEQ ID NO: 46041 - DNA, 21 bp, Artificial Sequence
  Synthetic: FXN 3 forward 9:69046102-69046126; SpCas9
cagttagaaaagcttgccctg

SEQ ID NO: 46042 - DNA, 20 bp, Artificial Sequence
  Synthetic: FXN 3 forward 9:69046103-69046126; SpCas9
agttagaaaagcttgccctg

SEQ ID NO: 46043 - DNA, 19 bp, Artificial Sequence
  Synthetic: FXN 3 forward 9:69046104-69046126; SpCas9
gttagaaaagcttgccctg

SEQ ID NO: 46044 - DNA, 18 bp, Artificial Sequence
  Synthetic: FXN 3 forward 9:69046105-69046126; SpCas9
ttagaaaagcttgccctg

SEQ ID NO: 46045 - DNA, 25 bp, Artificial Sequence
  Synthetic: FXN 3 forward 9:69046099-69046127; SpCas9
atacagttagaaaagcttgccctga

SEQ ID NO: 46046 - DNA, 24 bp, Artificial Sequence
  Synthetic: FXN 3 forward 9:69046100-69046127; SpCas9
tacagttagaaaagcttgccctga

SEQ ID NO: 46047 - DNA, 23 bp, Artificial Sequence
  Synthetic: FXN 3 forward 9:69046101-69046127; SpCas9
acagttagaaaagcttgccctga

SEQ ID NO: 46048 - DNA, 22 bp, Artificial Sequence
  Synthetic: FXN 3 forward 9:69046102-69046127; SpCas9
cagttagaaaagcttgccctga

SEQ ID NO: 46049 - DNA, 21 bp, Artificial Sequence
  Synthetic: FXN 3 forward 9:69046103-69046127; SpCas9
agttagaaaagcttgccctga

SEQ ID NO: 46050 - DNA, 20 bp, Artificial Sequence
  Synthetic: FXN 3 forward 9:69046104-69046127; SpCas9
gttagaaaagcttgccctga

SEQ ID NO: 46051 - DNA, 19 bp, Artificial Sequence
  Synthetic: FXN 3 forward 9:69046105-69046127; SpCas9
ttagaaaagcttgccctga

SEQ ID NO: 46052 - DNA, 18 bp, Artificial Sequence
  Synthetic: FXN 3 forward 9:69046106-69046127; SpCas9
tagaaaagcttgccctga

SEQ ID NO: 46053 - DNA, 25 bp, Artificial Sequence
  Synthetic: FXN 3 forward 9:69046100-69046128; SpCas9
tacagttagaaaagcttgccctgaa

SEQ ID NO: 46054 - DNA, 24 bp, Artificial Sequence
  Synthetic: FXN 3 forward 9:69046101-69046128; SpCas9
acagttagaaaagcttgccctgaa

SEQ ID NO: 46055 - DNA, 23 bp, Artificial Sequence
  Synthetic: FXN 3 forward 9:69046102-69046128; SpCas9
cagttagaaaagcttgccctgaa

SEQ ID NO: 46056 - DNA, 22 bp, Artificial Sequence
  Synthetic: FXN 3 forward 9:69046103-69046128; SpCas9
agttagaaaagcttgccctgaa

SEQ ID NO: 46057 - DNA, 21 bp, Artificial Sequence
  Synthetic: FXN 3 forward 9:69046104-69046128; SpCas9
gttagaaaagcttgccctgaa

SEQ ID NO: 46058 - DNA, 20 bp, Artificial Sequence
  Synthetic: FXN 3 forward 9:69046105-69046128; SpCas9
ttagaaaagcttgccctgaa

SEQ ID NO: 46059 - DNA, 19 bp, Artificial Sequence
  Synthetic: FXN 3 forward 9:69046106-69046128; SpCas9
tagaaaagcttgccctgaa

SEQ ID NO: 46060 - DNA, 18 bp, Artificial Sequence
  Synthetic: FXN 3 forward 9:69046107-69046128; SpCas9
agaaaagcttgccctgaa

SEQ ID NO: 46061 - DNA, 25 bp, Artificial Sequence
  Synthetic: FXN 3 forward 9:69046109-69046137; SpCas9
aaaagcttgccctgaagggaatgta

SEQ ID NO: 46062 - DNA, 24 bp, Artificial Sequence
  Synthetic: FXN 3 forward 9:69046110-69046137; SpCas9
aaagcttgccctgaagggaatgta

SEQ ID NO: 46063 - DNA, 23 bp, Artificial Sequence
  Synthetic: FXN 3 forward 9:69046111-69046137; SpCas9
aagcttgccctgaagggaatgta

SEQ ID NO: 46064 - DNA, 22 bp, Artificial Sequence
  Synthetic: FXN 3 forward 9:69046112-69046137; SpCas9
agcttgccctgaagggaatgta

SEQ ID NO: 46065 - DNA, 21 bp, Artificial Sequence
  Synthetic: FXN 3 forward 9:69046113-69046137; SpCas9
gcttgccctgaagggaatgta

SEQ ID NO: 46066 - DNA, 20 bp, Artificial Sequence
  Synthetic: FXN 3 forward 9:69046114-69046137; SpCas9
cttgccctgaagggaatgta

SEQ ID NO: 46067 - DNA, 19 bp, Artificial Sequence
  Synthetic: FXN 3 forward 9:69046115-69046137; SpCas9
ttgccctgaagggaatgta

SEQ ID NO: 46068 - DNA, 18 bp, Artificial Sequence
  Synthetic: FXN 3 forward 9:69046116-69046137; SpCas9
tgccctgaagggaatgta

SEQ ID NO: 46069 - DNA, 25 bp, Artificial Sequence
  Synthetic: FXN 3 forward 9:69046114-69046142; SpCas9
cttgccctgaagggaatgtatggtg

SEQ ID NO: 46070 - DNA, 24 bp, Artificial Sequence
  Synthetic: FXN 3 forward 9:69046115-69046142; SpCas9
ttgccctgaagggaatgtatggtg

SEQ ID NO: 46071 - DNA, 23 bp, Artificial Sequence
  Synthetic: FXN 3 forward 9:69046116-69046142; SpCas9
tgccctgaagggaatgtatggtg

SEQ ID NO: 46072 - DNA, 22 bp, Artificial Sequence
  Synthetic: FXN 3 forward 9:69046117-69046142; SpCas9
gccctgaagggaatgtatggtg

SEQ ID NO: 46073 - DNA, 21 bp, Artificial Sequence
  Synthetic: FXN 3 forward 9:69046118-69046142; SpCas9
ccctgaagggaatgtatggtg

SEQ ID NO: 46074 - DNA, 20 bp, Artificial Sequence
  Synthetic: FXN 3 forward 9:69046119-69046142; SpCas9
cctgaagggaatgtatggtg

SEQ ID NO: 46075 - DNA, 19 bp, Artificial Sequence
  Synthetic: FXN 3 forward 9:69046120-69046142; SpCas9
ctgaagggaatgtatggtg

SEQ ID NO: 46076 - DNA, 18 bp, Artificial Sequence
  Synthetic: FXN 3 forward 9:69046121-69046142; SpCas9
tgaagggaatgtatggtg

SEQ ID NO: 46077 - DNA, 25 bp, Artificial Sequence
  Synthetic: FXN 3 reverse 9:69046114-69046142; SpCas9
cttcaccatacattcccttcagggc

SEQ ID NO: 46078 - DNA, 24 bp, Artificial Sequence
  Synthetic: FXN 3 reverse 9:69046115-69046142; SpCas9
ttcaccatacattcccttcagggc

SEQ ID NO: 46079 - DNA, 23 bp, Artificial Sequence
  Synthetic: FXN 3 reverse 9:69046116-69046142; SpCas9
tcaccatacattcccttcagggc

SEQ ID NO: 46080 - DNA, 22 bp, Artificial Sequence
  Synthetic: FXN 3 reverse 9:69046117-69046142; SpCas9
caccatacattcccttcagggc

SEQ ID NO: 46081 - DNA, 21 bp, Artificial Sequence
  Synthetic: FXN 3 reverse 9:69046118-69046142; SpCas9
accatacattcccttcagggc

SEQ ID NO: 46082 - DNA, 20 bp, Artificial Sequence
  Synthetic: FXN 3 reverse 9:69046119-69046142; SpCas9
ccatacattcccttcagggc

SEQ ID NO: 46083 - DNA, 19 bp, Artificial Sequence
  Synthetic: FXN 3 reverse 9:69046120-69046142; SpCas9
catacattcccttcagggc

SEQ ID NO: 46084 - DNA, 18 bp, Artificial Sequence
  Synthetic: FXN 3 reverse 9:69046121-69046142; SpCas9
atacattcccttcagggc

SEQ ID NO: 46085 - DNA, 25 bp, Artificial Sequence
  Synthetic: FXN 3 forward 9:69046115-69046143; SpCas9
ttgccctgaagggaatgtatggtga

SEQ ID NO: 46086 - DNA, 24 bp, Artificial Sequence
  Synthetic: FXN 3 forward 9:69046116-69046143; SpCas9
tgccctgaagggaatgtatggtga

SEQ ID NO: 46087 - DNA, 23 bp, Artificial Sequence
  Synthetic: FXN 3 forward 9:69046117-69046143; SpCas9
gccctgaagggaatgtatggtga

SEQ ID NO: 46088 - DNA, 22 bp, Artificial Sequence
  Synthetic: FXN 3 forward 9:69046118-69046143; SpCas9
ccctgaagggaatgtatggtga

SEQ ID NO: 46089 - DNA, 21 bp, Artificial Sequence
  Synthetic: FXN 3 forward 9:69046119-69046143; SpCas9
cctgaagggaatgtatggtga

SEQ ID NO: 46090 - DNA, 20 bp, Artificial Sequence
  Synthetic: FXN 3 forward 9:69046120-69046143; SpCas9
ctgaagggaatgtatggtga

SEQ ID NO: 46091 - DNA, 19 bp, Artificial Sequence
  Synthetic: FXN 3 forward 9:69046121-69046143; SpCas9
tgaagggaatgtatggtga

SEQ ID NO: 46092 - DNA, 18 bp, Artificial Sequence
  Synthetic: FXN 3 forward 9:69046122-69046143; SpCas9
gaagggaatgtatggtga

SEQ ID NO: 46093 - DNA, 25 bp, Artificial Sequence
  Synthetic: FXN 3 forward 9:69046116-69046144; SpCas9
tgccctgaagggaatgtatggtgaa

SEQ ID NO: 46094 - DNA, 24 bp, Artificial Sequence
  Synthetic: FXN 3 forward 9:69046117-69046144; SpCas9
gccctgaagggaatgtatggtgaa

SEQ ID NO: 46095 - DNA, 23 bp, Artificial Sequence
  Synthetic: FXN 3 forward 9:69046118-69046144; SpCas9
ccctgaagggaatgtatggtgaa

SEQ ID NO: 46096 - DNA, 22 bp, Artificial Sequence
  Synthetic: FXN 3 forward 9:69046119-69046144; SpCas9
cctgaagggaatgtatggtgaa

SEQ ID NO: 46097 - DNA, 21 bp, Artificial Sequence
  Synthetic: FXN 3 forward 9:69046120-69046144; SpCas9
ctgaagggaatgtatggtgaa

SEQ ID NO: 46098 - DNA, 20 bp, Artificial Sequence
  Synthetic: FXN 3 forward 9:69046121-69046144; SpCas9
tgaagggaatgtatggtgaa

SEQ ID NO: 46099 - DNA, 19 bp, Artificial Sequence
  Synthetic: FXN 3 forward 9:69046122-69046144; SpCas9
gaagggaatgtatggtgaa

SEQ ID NO: 46100 - DNA, 18 bp, Artificial Sequence
  Synthetic: FXN 3 forward 9:69046123-69046144; SpCas9
aagggaatgtatggtgaa

SEQ ID NO: 46101 - DNA, 25 bp, Artificial Sequence
  Synthetic: FXN 3 forward 9:69046117-69046145; SpCas9
gccctgaagggaatgtatggtgaag

SEQ ID NO: 46102 - DNA, 24 bp, Artificial Sequence
  Synthetic: FXN 3 forward 9:69046118-69046145; SpCas9
ccctgaagggaatgtatggtgaag

SEQ ID NO: 46103 - DNA, 23 bp, Artificial Sequence
  Synthetic: FXN 3 forward 9:69046119-69046145; SpCas9
cctgaagggaatgtatggtgaag

SEQ ID NO: 46104 - DNA, 22 bp, Artificial Sequence
  Synthetic: FXN 3 forward 9:69046120-69046145; SpCas9
ctgaagggaatgtatggtgaag

SEQ ID NO: 46105 - DNA, 21 bp, Artificial Sequence
  Synthetic: FXN 3 forward 9:69046121-69046145; SpCas9
tgaagggaatgtatggtgaag

SEQ ID NO: 46106 - DNA, 20 bp, Artificial Sequence
  Synthetic: FXN 3 forward 9:69046122-69046145; SpCas9
gaagggaatgtatggtgaag

SEQ ID NO: 46107 - DNA, 19 bp, Artificial Sequence
  Synthetic: FXN 3 forward 9:69046123-69046145; SpCas9
aagggaatgtatggtgaag

SEQ ID NO: 46108 - DNA, 18 bp, Artificial Sequence
  Synthetic: FXN 3 forward 9:69046124-69046145; SpCas9
agggaatgtatggtgaag

SEQ ID NO: 46109 - DNA, 25 bp, Artificial Sequence
  Synthetic: FXN 3 reverse 9:69046118-69046146; SpCas9
tccccttcaccatacattcccttca

SEQ ID NO: 46110 - DNA, 24 bp, Artificial Sequence
  Synthetic: FXN 3 reverse 9:69046119-69046146; SpCas9
ccccttcaccatacattcccttca

SEQ ID NO: 46111 - DNA, 23 bp, Artificial Sequence
  Synthetic: FXN 3 reverse 9:69046120-69046146; SpCas9
cccttcaccatacattcccttca

SEQ ID NO: 46112 - DNA, 22 bp, Artificial Sequence
  Synthetic: FXN 3 reverse 9:69046121-69046146; SpCas9
ccttcaccatacattcccttca

SEQ ID NO: 46113 - DNA, 21 bp, Artificial Sequence
  Synthetic: FXN 3 reverse 9:69046122-69046146; SpCas9
cttcaccatacattcccttca

SEQ ID NO: 46114 - DNA, 20 bp, Artificial Sequence
  Synthetic: FXN 3 reverse 9:69046123-69046146; SpCas9
ttcaccatacattcccttca

SEQ ID NO: 46115 - DNA, 19 bp, Artificial Sequence
  Synthetic: FXN 3 reverse 9:69046124-69046146; SpCas9
tcaccatacattcccttca

SEQ ID NO: 46116 - DNA, 18 bp, Artificial Sequence
  Synthetic: FXN 3 reverse 9:69046125-69046146; SpCas9
caccatacattcccttca

SEQ ID NO: 46117 - DNA, 25 bp, Artificial Sequence
  Synthetic: FXN 3 forward 9:69046119-69046147; SpCas9
cctgaagggaatgtatggtgaaggg

SEQ ID NO: 46118 - DNA, 24 bp, Artificial Sequence
  Synthetic: FXN 3 forward 9:69046120-69046147; SpCas9
ctgaagggaatgtatggtgaaggg

SEQ ID NO: 46119 - DNA, 23 bp, Artificial Sequence
  Synthetic: FXN 3 forward 9:69046121-69046147; SpCas9
tgaagggaatgtatggtgaaggg

SEQ ID NO: 46120 - DNA, 22 bp, Artificial Sequence
  Synthetic: FXN 3 forward 9:69046122-69046147; SpCas9
gaagggaatgtatggtgaaggg

SEQ ID NO: 46121 - DNA, 21 bp, Artificial Sequence
  Synthetic: FXN 3 forward 9:69046123-69046147; SpCas9
aagggaatgtatggtgaaggg

SEQ ID NO: 46122 - DNA, 20 bp, Artificial Sequence
  Synthetic: FXN 3 forward 9:69046124-69046147; SpCas9
agggaatgtatggtgaaggg

SEQ ID NO: 46123 - DNA, 19 bp, Artificial Sequence
  Synthetic: FXN 3 forward 9:69046125-69046147; SpCas9
gggaatgtatggtgaaggg

SEQ ID NO: 46124 - DNA, 18 bp, Artificial Sequence
  Synthetic: FXN 3 forward 9:69046126-69046147; SpCas9
ggaatgtatggtgaaggg

SEQ ID NO: 46125 - DNA, 25 bp, Artificial Sequence
  Synthetic: FXN 3 reverse 9:69046119-69046147; SpCas9
ctccccttcaccatacattcccttc

SEQ ID NO: 46126 - DNA, 24 bp, Artificial Sequence
  Synthetic: FXN 3 reverse 9:69046120-69046147; SpCas9
tccccttcaccatacattcccttc

SEQ ID NO: 46127 - DNA, 23 bp, Artificial Sequence
  Synthetic: FXN 3 reverse 9:69046121-69046147; SpCas9
ccccttcaccatacattcccttc

SEQ ID NO: 46128 - DNA, 22 bp, Artificial Sequence
  Synthetic: FXN 3 reverse 9:69046122-69046147; SpCas9
cccttcaccatacattcccttc

SEQ ID NO: 46129 - DNA, 21 bp, Artificial Sequence
  Synthetic: FXN 3 reverse 9:69046123-69046147; SpCas9
ccttcaccatacattcccttc

SEQ ID NO: 46130 - DNA, 20 bp, Artificial Sequence
  Synthetic: FXN 3 reverse 9:69046124-69046147; SpCas9
cttcaccatacattcccttc

SEQ ID NO: 46131 - DNA, 19 bp, Artificial Sequence
  Synthetic: FXN 3 reverse 9:69046125-69046147; SpCas9
ttcaccatacattcccttc

SEQ ID NO: 46132 - DNA, 18 bp, Artificial Sequence
  Synthetic: FXN 3 reverse 9:69046126-69046147; SpCas9
tcaccatacattcccttc

SEQ ID NO: 46133 - DNA, 25 bp, Artificial Sequence
  Synthetic: FXN 3 forward 9:69046120-69046148; SpCas9
ctgaagggaatgtatggtgaagggg

SEQ ID NO: 46134 - DNA, 24 bp, Artificial Sequence
  Synthetic: FXN 3 forward 9:69046121-69046148; SpCas9
tgaagggaatgtatggtgaagggg

SEQ ID NO: 46135 - DNA, 23 bp, Artificial Sequence
  Synthetic: FXN 3 forward 9:69046122-69046148; SpCas9
gaagggaatgtatggtgaagggg

SEQ ID NO: 46136 - DNA, 22 bp, Artificial Sequence
  Synthetic: FXN 3 forward 9:69046123-69046148; SpCas9
aagggaatgtatggtgaagggg

SEQ ID NO: 46137 - DNA, 21 bp, Artificial Sequence
  Synthetic: FXN 3 forward 9:69046124-69046148; SpCas9
agggaatgtatggtgaagggg

SEQ ID NO: 46138 - DNA, 20 bp, Artificial Sequence
  Synthetic: FXN 3 forward 9:69046125-69046148; SpCas9
gggaatgtatggtgaagggg

SEQ ID NO: 46139 - DNA, 19 bp, Artificial Sequence
  Synthetic: FXN 3 forward 9:69046126-69046148; SpCas9
ggaatgtatggtgaagggg

SEQ ID NO: 46140 - DNA, 18 bp, Artificial Sequence
  Synthetic: FXN 3 forward 9:69046127-69046148; SpCas9
gaatgtatggtgaagggg

SEQ ID NO: 46141 - DNA, 25 bp, Artificial Sequence
  Synthetic: FXN 3 reverse 9:69046120-69046148; SpCas9
cctccccttcaccatacattccctt

SEQ ID NO: 46142 - DNA, 24 bp, Artificial Sequence
  Synthetic: FXN 3 reverse 9:69046121-69046148; SpCas9
ctccccttcaccatacattccctt

SEQ ID NO: 46143 - DNA, 23 bp, Artificial Sequence
  Synthetic: FXN 3 reverse 9:69046122-69046148; SpCas9
tccccttcaccatacattccctt

SEQ ID NO: 46144 - DNA, 22 bp, Artificial Sequence
  Synthetic: FXN 3 reverse 9:69046123-69046148; SpCas9
ccccttcaccatacattccctt

SEQ ID NO: 46145 - DNA, 21 bp, Artificial Sequence
  Synthetic: FXN 3 reverse 9:69046124-69046148; SpCas9
cccttcaccatacattccctt

SEQ ID NO: 46146 - DNA, 20 bp, Artificial Sequence
  Synthetic: FXN 3 reverse 9:69046125-69046148; SpCas9
ccttcaccatacattccctt

SEQ ID NO: 46147 - DNA, 19 bp, Artificial Sequence
  Synthetic: FXN 3 reverse 9:69046126-69046148; SpCas9
cttcaccatacattccctt

SEQ ID NO: 46148 - DNA, 18 bp, Artificial Sequence
  Synthetic: FXN 3 reverse 9:69046127-69046148; SpCas9
ttcaccatacattccctt

SEQ ID NO: 46149 - DNA, 25 bp, Artificial Sequence
  Synthetic: FXN 3 forward 9:69046126-69046154; SpCas9
ggaatgtatggtgaaggggaggtga

SEQ ID NO: 46150 - DNA, 24 bp, Artificial Sequence
  Synthetic: FXN 3 forward 9:69046127-69046154; SpCas9
gaatgtatggtgaaggggaggtga

SEQ ID NO: 46151 - DNA, 23 bp, Artificial Sequence
  Synthetic: FXN 3 forward 9:69046128-69046154; SpCas9
aatgtatggtgaaggggaggtga

SEQ ID NO: 46152 - DNA, 22 bp, Artificial Sequence
  Synthetic: FXN 3 forward 9:69046129-69046154; SpCas9
atgtatggtgaaggggaggtga

SEQ ID NO: 46153 - DNA, 21 bp, Artificial Sequence
  Synthetic: FXN 3 forward 9:69046130-69046154; SpCas9
tgtatggtgaaggggaggtga

SEQ ID NO: 46154 - DNA, 20 bp, Artificial Sequence
  Synthetic: FXN 3 forward 9:69046131-69046154; SpCas9
gtatggtgaaggggaggtga

SEQ ID NO: 46155 - DNA, 19 bp, Artificial Sequence
  Synthetic: FXN 3 forward 9:69046132-69046154; SpCas9
tatggtgaaggggaggtga

SEQ ID NO: 46156 - DNA, 18 bp, Artificial Sequence
  Synthetic: FXN 3 forward 9:69046133-69046154; SpCas9
atggtgaaggggaggtga

SEQ ID NO: 46157 - DNA, 25 bp, Artificial Sequence
  Synthetic: FXN 3 forward 9:69046127-69046155; SpCas9
gaatgtatggtgaaggggaggtgaa

SEQ ID NO: 46158 - DNA, 24 bp, Artificial Sequence
  Synthetic: FXN 3 forward 9:69046128-69046155; SpCas9
aatgtatggtgaaggggaggtgaa

SEQ ID NO: 46159 - DNA, 23 bp, Artificial Sequence
  Synthetic: FXN 3 forward 9:69046129-69046155; SpCas9
atgtatggtgaaggggaggtgaa

SEQ ID NO: 46160 - DNA, 22 bp, Artificial Sequence
  Synthetic: FXN 3 forward 9:69046130-69046155; SpCas9
tgtatggtgaaggggaggtgaa

SEQ ID NO: 46161 - DNA, 21 bp, Artificial Sequence
  Synthetic: FXN 3 forward 9:69046131-69046155; SpCas9
gtatggtgaaggggaggtgaa

SEQ ID NO: 46162 - DNA, 20 bp, Artificial Sequence
  Synthetic: FXN 3 forward 9:69046132-69046155; SpCas9
tatggtgaaggggaggtgaa

SEQ ID NO: 46163 - DNA, 19 bp, Artificial Sequence
  Synthetic: FXN 3 forward 9:69046133-69046155; SpCas9
atggtgaaggggaggtgaa

SEQ ID NO: 46164 - DNA, 18 bp, Artificial Sequence
  Synthetic: FXN 3 forward 9:69046134-69046155; SpCas9
tggtgaaggggaggtgaa

SEQ ID NO: 46165 - DNA, 25 bp, Artificial Sequence
  Synthetic: FXN 3 forward 9:69046147-69046175; SpCas9
gtgaaaggttatatttgcatttctg

SEQ ID NO: 46166 - DNA, 24 bp, Artificial Sequence
  Synthetic: FXN 3 forward 9:69046148-69046175; SpCas9
tgaaaggttatatttgcatttctg

SEQ ID NO: 46167 - DNA, 23 bp, Artificial Sequence
  Synthetic: FXN 3 forward 9:69046149-69046175; SpCas9
gaaaggttatatttgcatttctg

SEQ ID NO: 46168 - DNA, 22 bp, Artificial Sequence
  Synthetic: FXN 3 forward 9:69046150-69046175; SpCas9
aaaggttatatttgcatttctg

SEQ ID NO: 46169 - DNA, 21 bp, Artificial Sequence
  Synthetic: FXN 3 forward 9:69046151-69046175; SpCas9
aaggttatatttgcatttctg

SEQ ID NO: 46170 - DNA, 20 bp, Artificial Sequence
  Synthetic: FXN 3 forward 9:69046152-69046175; SpCas9
aggttatatttgcatttctg

SEQ ID NO: 46171 - DNA, 19 bp, Artificial Sequence
  Synthetic: FXN 3 forward 9:69046153-69046175; SpCas9
ggttatatttgcatttctg

SEQ ID NO: 46172 - DNA, 18 bp, Artificial Sequence
  Synthetic: FXN 3 forward 9:69046154-69046175; SpCas9
gttatatttgcatttctg

SEQ ID NO: 46173 - DNA, 25 bp, Artificial Sequence
  Synthetic: FXN 3 forward 9:69046148-69046176; SpCas9
tgaaaggttatatttgcatttctga

SEQ ID NO: 46174 - DNA, 24 bp, Artificial Sequence
  Synthetic: FXN 3 forward 9:69046149-69046176; SpCas9
gaaaggttatatttgcatttctga

SEQ ID NO: 46175 - DNA, 23 bp, Artificial Sequence
  Synthetic: FXN 3 forward 9:69046150-69046176; SpCas9
aaaggttatatttgcatttctga

SEQ ID NO: 46176 - DNA, 22 bp, Artificial Sequence
  Synthetic: FXN 3 forward 9:69046151-69046176; SpCas9
aaggttatatttgcatttctga

SEQ ID NO: 46177 - DNA, 21 bp, Artificial Sequence
  Synthetic: FXN 3 forward 9:69046152-69046176; SpCas9
aggttatatttgcatttctga

SEQ ID NO: 46178 - DNA, 20 bp, Artificial Sequence
  Synthetic: FXN 3 forward 9:69046153-69046176; SpCas9
ggttatatttgcatttctga

SEQ ID NO: 46179 - DNA, 19 bp, Artificial Sequence
  Synthetic: FXN 3 forward 9:69046154-69046176; SpCas9
gttatatttgcatttctga

SEQ ID NO: 46180 - DNA, 18 bp, Artificial Sequence
  Synthetic: FXN 3 forward 9:69046155-69046176; SpCas9
ttatatttgcatttctga

SEQ ID NO: 46181 - DNA, 25 bp, Artificial Sequence
  Synthetic: FXN 3 forward 9:69046149-69046177; SpCas9
gaaaggttatatttgcatttctgaa

SEQ ID NO: 46182 - DNA, 24 bp, Artificial Sequence
  Synthetic: FXN 3 forward 9:69046150-69046177; SpCas9
aaaggttatatttgcatttctgaa

SEQ ID NO: 46183 - DNA, 23 bp, Artificial Sequence
  Synthetic: FXN 3 forward 9:69046151-69046177; SpCas9
aaggttatatttgcatttctgaa

SEQ ID NO: 46184 - DNA, 22 bp, Artificial Sequence
  Synthetic: FXN 3 forward 9:69046152-69046177; SpCas9
aggttatatttgcatttctgaa

SEQ ID NO: 46185 - DNA, 21 bp, Artificial Sequence
  Synthetic: FXN 3 forward 9:69046153-69046177; SpCas9
ggttatatttgcatttctgaa

SEQ ID NO: 46186 - DNA, 20 bp, Artificial Sequence
  Synthetic: FXN 3 forward 9:69046154-69046177; SpCas9
gttatatttgcatttctgaa

SEQ ID NO: 46187 - DNA, 19 bp, Artificial Sequence
  Synthetic: FXN 3 forward 9:69046155-69046177; SpCas9
ttatatttgcatttctgaa

SEQ ID NO: 46188 - DNA, 18 bp, Artificial Sequence
  Synthetic: FXN 3 forward 9:69046156-69046177; SpCas9
tatatttgcatttctgaa

SEQ ID NO: 46189 - DNA, 25 bp, Artificial Sequence
  Synthetic: FXN 3 forward 9:69046154-69046182; SpCas9
gttatatttgcatttctgaagggct

SEQ ID NO: 46190 - DNA, 24 bp, Artificial Sequence
  Synthetic: FXN 3 forward 9:69046155-69046182; SpCas9
ttatatttgcatttctgaagggct

SEQ ID NO: 46191 - DNA, 23 bp, Artificial Sequence
  Synthetic: FXN 3 forward 9:69046156-69046182; SpCas9
tatatttgcatttctgaagggct

SEQ ID NO: 46192 - DNA, 22 bp, Artificial Sequence
  Synthetic: FXN 3 forward 9:69046157-69046182; SpCas9
atatttgcatttctgaagggct

SEQ ID NO: 46193 - DNA, 21 bp, Artificial Sequence
  Synthetic: FXN 3 forward 9:69046158-69046182; SpCas9
tatttgcatttctgaagggct

SEQ ID NO: 46194 - DNA, 20 bp, Artificial Sequence
  Synthetic: FXN 3 forward 9:69046159-69046182; SpCas9
atttgcatttctgaagggct

SEQ ID NO: 46195 - DNA, 19 bp, Artificial Sequence
  Synthetic: FXN 3 forward 9:69046160-69046182; SpCas9
tttgcatttctgaagggct

SEQ ID NO: 46196 - DNA, 18 bp, Artificial Sequence
  Synthetic: FXN 3 forward 9:69046161-69046182; SpCas9
ttgcatttctgaagggct

SEQ ID NO: 46197 - DNA, 25 bp, Artificial Sequence
  Synthetic: FXN 3 forward 9:69046157-69046185; SpCas9
atatttgcatttctgaagggctaag

SEQ ID NO: 46198 - DNA, 24 bp, Artificial Sequence
  Synthetic: FXN 3 forward 9:69046158-69046185; SpCas9
tatttgcatttctgaagggctaag

SEQ ID NO: 46199 - DNA, 23 bp, Artificial Sequence
  Synthetic: FXN 3 forward 9:69046159-69046185; SpCas9
atttgcatttctgaagggctaag

SEQ ID NO: 46200 - DNA, 22 bp, Artificial Sequence
  Synthetic: FXN 3 forward 9:69046160-69046185; SpCas9
tttgcatttctgaagggctaag

SEQ ID NO: 46201 - DNA, 21 bp, Artificial Sequence
  Synthetic: FXN 3 forward 9:69046161-69046185; SpCas9
ttgcatttctgaagggctaag

SEQ ID NO: 46202 - DNA, 20 bp, Artificial Sequence
  Synthetic: FXN 3 forward 9:69046162-69046185; SpCas9
tgcatttctgaagggctaag

SEQ ID NO: 46203 - DNA, 19 bp, Artificial Sequence
  Synthetic: FXN 3 forward 9:69046163-69046185; SpCas9
gcatttctgaagggctaag

SEQ ID NO: 46204 - DNA, 18 bp, Artificial Sequence
  Synthetic: FXN 3 forward 9:69046164-69046185; SpCas9
catttctgaagggctaag

SEQ ID NO: 46205 - DNA, 25 bp, Artificial Sequence
  Synthetic: FXN 3 forward 9:69046158-69046186; SpCas9
tatttgcatttctgaagggctaagt

SEQ ID NO: 46206 - DNA, 24 bp, Artificial Sequence
  Synthetic: FXN 3 forward 9:69046159-69046186; SpCas9
atttgcatttctgaagggctaagt

SEQ ID NO: 46207 - DNA, 23 bp, Artificial Sequence
  Synthetic: FXN 3 forward 9:69046160-69046186; SpCas9
tttgcatttctgaagggctaagt

SEQ ID NO: 46208 - DNA, 22 bp, Artificial Sequence
  Synthetic: FXN 3 forward 9:69046161-69046186; SpCas9
ttgcatttctgaagggctaagt

SEQ ID NO: 46209 - DNA, 21 bp, Artificial Sequence
  Synthetic: FXN 3 forward 9:69046162-69046186; SpCas9
tgcatttctgaagggctaagt

SEQ ID NO: 46210 - DNA, 20 bp, Artificial Sequence
  Synthetic: FXN 3 forward 9:69046163-69046186; SpCas9
gcatttctgaagggctaagt

SEQ ID NO: 46211 - DNA, 19 bp, Artificial Sequence
  Synthetic: FXN 3 forward 9:69046164-69046186; SpCas9
catttctgaagggctaagt

SEQ ID NO: 46212 - DNA, 18 bp, Artificial Sequence
  Synthetic: FXN 3 forward 9:69046165-69046186; SpCas9
atttctgaagggctaagt

SEQ ID NO: 46213 - DNA, 25 bp, Artificial Sequence
  Synthetic: FXN 3 forward 9:69046165-69046193; SpCas9
atttctgaagggctaagtaggaaac

SEQ ID NO: 46214 - DNA, 24 bp, Artificial Sequence
  Synthetic: FXN 3 forward 9:69046166-69046193; SpCas9
tttctgaagggctaagtaggaaac

SEQ ID NO: 46215 - DNA, 23 bp, Artificial Sequence
  Synthetic: FXN 3 forward 9:69046167-69046193; SpCas9
ttctgaagggctaagtaggaaac

SEQ ID NO: 46216 - DNA, 22 bp, Artificial Sequence
  Synthetic: FXN 3 forward 9:69046168-69046193; SpCas9
tctgaagggctaagtaggaaac

SEQ ID NO: 46217 - DNA, 21 bp, Artificial Sequence
  Synthetic: FXN 3 forward 9:69046169-69046193; SpCas9
ctgaagggctaagtaggaaac

SEQ ID NO: 46218 - DNA, 20 bp, Artificial Sequence
  Synthetic: FXN 3 forward 9:69046170-69046193; SpCas9
tgaagggctaagtaggaaac

SEQ ID NO: 46219 - DNA, 19 bp, Artificial Sequence
  Synthetic: FXN 3 forward 9:69046171-69046193; SpCas9
gaagggctaagtaggaaac

SEQ ID NO: 46220 - DNA, 18 bp, Artificial Sequence
  Synthetic: FXN 3 forward 9:69046172-69046193; SpCas9
aagggctaagtaggaaac

SEQ ID NO: 46221 - DNA, 25 bp, Artificial Sequence
  Synthetic: FXN 3 forward 9:69046166-69046194; SpCas9
tttctgaagggctaagtaggaaacc

SEQ ID NO: 46222 - DNA, 24 bp, Artificial Sequence
  Synthetic: FXN 3 forward 9:69046167-69046194; SpCas9
ttctgaagggctaagtaggaaacc

SEQ ID NO: 46223 - DNA, 23 bp, Artificial Sequence
  Synthetic: FXN 3 forward 9:69046168-69046194; SpCas9
tctgaagggctaagtaggaaacc

SEQ ID NO: 46224 - DNA, 22 bp, Artificial Sequence
  Synthetic: FXN 3 forward 9:69046169-69046194; SpCas9
ctgaagggctaagtaggaaacc

SEQ ID NO: 46225 - DNA, 21 bp, Artificial Sequence
  Synthetic: FXN 3 forward 9:69046170-69046194; SpCas9
tgaagggctaagtaggaaacc

SEQ ID NO: 46226 - DNA, 20 bp, Artificial Sequence
  Synthetic: FXN 3 forward 9:69046171-69046194; SpCas9
gaagggctaagtaggaaacc

SEQ ID NO: 46227 - DNA, 19 bp, Artificial Sequence
  Synthetic: FXN 3 forward 9:69046172-69046194; SpCas9
aagggctaagtaggaaacc

SEQ ID NO: 46228 - DNA, 18 bp, Artificial Sequence
  Synthetic: FXN 3 forward 9:69046173-69046194; SpCas9
agggctaagtaggaaacc

SEQ ID NO: 46229 - DNA, 25 bp, Artificial Sequence
  Synthetic: FXN 3 reverse 9:69046169-69046197; SpCas9
gttcccggtttcctacttagccctt

SEQ ID NO: 46230 - DNA, 24 bp, Artificial Sequence
  Synthetic: FXN 3 reverse 9:69046170-69046197; SpCas9
ttcccggtttcctacttagccctt

SEQ ID NO: 46231 - DNA, 23 bp, Artificial Sequence
  Synthetic: FXN 3 reverse 9:69046171-69046197; SpCas9
tcccggtttcctacttagccctt

SEQ ID NO: 46232 - DNA, 22 bp, Artificial Sequence
  Synthetic: FXN 3 reverse 9:69046172-69046197; SpCas9
cccggtttcctacttagccctt

SEQ ID NO: 46233 - DNA, 21 bp, Artificial Sequence
  Synthetic: FXN 3 reverse 9:69046173-69046197; SpCas9
ccggtttcctacttagccctt

SEQ ID NO: 46234 - DNA, 20 bp, Artificial Sequence
  Synthetic: FXN 3 reverse 9:69046174-69046197; SpCas9
cggtttcctacttagccctt

SEQ ID NO: 46235 - DNA, 19 bp, Artificial Sequence
  Synthetic: FXN 3 reverse 9:69046175-69046197; SpCas9
ggtttcctacttagccctt

SEQ ID NO: 46236 - DNA, 18 bp, Artificial Sequence
  Synthetic: FXN 3 reverse 9:69046176-69046197; SpCas9
gtttcctacttagccctt

SEQ ID NO: 46237 - DNA, 25 bp, Artificial Sequence
  Synthetic: FXN 3 forward 9:69046172-69046200; SpCas9
aagggctaagtaggaaaccgggaac

SEQ ID NO: 46238 - DNA, 24 bp, Artificial Sequence
  Synthetic: FXN 3 forward 9:69046173-69046200; SpCas9
agggctaagtaggaaaccgggaac

SEQ ID NO: 46239 - DNA, 23 bp, Artificial Sequence
  Synthetic: FXN 3 forward 9:69046174-69046200; SpCas9
gggctaagtaggaaaccgggaac

SEQ ID NO: 46240 - DNA, 22 bp, Artificial Sequence
  Synthetic: FXN 3 forward 9:69046175-69046200; SpCas9
ggctaagtaggaaaccgggaac

SEQ ID NO: 46241 - DNA, 21 bp, Artificial Sequence
  Synthetic: FXN 3 forward 9:69046176-69046200; SpCas9
gctaagtaggaaaccgggaac

SEQ ID NO: 46242 - DNA, 20 bp, Artificial Sequence
  Synthetic: FXN 3 forward 9:69046177-69046200; SpCas9
ctaagtaggaaaccgggaac

SEQ ID NO: 46243 - DNA, 19 bp, Artificial Sequence
  Synthetic: FXN 3 forward 9:69046178-69046200; SpCas9
taagtaggaaaccgggaac

SEQ ID NO: 46244 - DNA, 18 bp, Artificial Sequence
  Synthetic: FXN 3 forward 9:69046179-69046200; SpCas9
aagtaggaaaccgggaac

SEQ ID NO: 46245 - DNA, 25 bp, Artificial Sequence
  Synthetic: FXN 3 forward 9:69046173-69046201; SpCas9
agggctaagtaggaaaccgggaacc

SEQ ID NO: 46246 - DNA, 24 bp, Artificial Sequence
  Synthetic: FXN 3 forward 9:69046174-69046201; SpCas9
gggctaagtaggaaaccgggaacc

SEQ ID NO: 46247 - DNA, 23 bp, Artificial Sequence
  Synthetic: FXN 3 forward 9:69046175-69046201; SpCas9
ggctaagtaggaaaccgggaacc

SEQ ID NO: 46248 - DNA, 22 bp, Artificial Sequence
  Synthetic: FXN 3 forward 9:69046176-69046201; SpCas9
gctaagtaggaaaccgggaacc

SEQ ID NO: 46249 - DNA, 21 bp, Artificial Sequence
  Synthetic: FXN 3 forward 9:69046177-69046201; SpCas9
ctaagtaggaaaccgggaacc

SEQ ID NO: 46250 - DNA, 20 bp, Artificial Sequence
  Synthetic: FXN 3 forward 9:69046178-69046201; SpCas9
taagtaggaaaccgggaacc

SEQ ID NO: 46251 - DNA, 19 bp, Artificial Sequence
  Synthetic: FXN 3 forward 9:69046179-69046201; SpCas9
aagtaggaaaccgggaacc

SEQ ID NO: 46252 - DNA, 18 bp, Artificial Sequence
  Synthetic: FXN 3 forward 9:69046180-69046201; SpCas9
agtaggaaaccgggaacc

SEQ ID NO: 46253 - DNA, 25 bp, Artificial Sequence
  Synthetic: FXN 3 forward 9:69046174-69046202; SpCas9
gggctaagtaggaaaccgggaacca

SEQ ID NO: 46254 - DNA, 24 bp, Artificial Sequence
  Synthetic: FXN 3 forward 9:69046175-69046202; SpCas9
ggctaagtaggaaaccgggaacca

SEQ ID NO: 46255 - DNA, 23 bp, Artificial Sequence
  Synthetic: FXN 3 forward 9:69046176-69046202; SpCas9
gctaagtaggaaaccgggaacca

SEQ ID NO: 46256 - DNA, 22 bp, Artificial Sequence
  Synthetic: FXN 3 forward 9:69046177-69046202; SpCas9
ctaagtaggaaaccgggaacca

SEQ ID NO: 46257 - DNA, 21 bp, Artificial Sequence
  Synthetic: FXN 3 forward 9:69046178-69046202; SpCas9
taagtaggaaaccgggaacca

SEQ ID NO: 46258 - DNA, 20 bp, Artificial Sequence
  Synthetic: FXN 3 forward 9:69046179-69046202; SpCas9
aagtaggaaaccgggaacca

SEQ ID NO: 46259 - DNA, 19 bp, Artificial Sequence
  Synthetic: FXN 3 forward 9:69046180-69046202; SpCas9
agtaggaaaccgggaacca

SEQ ID NO: 46260 - DNA, 18 bp, Artificial Sequence
  Synthetic: FXN 3 forward 9:69046181-69046202; SpCas9
gtaggaaaccgggaacca

SEQ ID NO: 46261 - DNA, 25 bp, Artificial Sequence
  Synthetic: FXN 3 forward 9:69046175-69046203; SpCas9
ggctaagtaggaaaccgggaaccag

SEQ ID NO: 46262 - DNA, 24 bp, Artificial Sequence
  Synthetic: FXN 3 forward 9:69046176-69046203; SpCas9
gctaagtaggaaaccgggaaccag

SEQ ID NO: 46263 - DNA, 23 bp, Artificial Sequence
  Synthetic: FXN 3 forward 9:69046177-69046203; SpCas9
ctaagtaggaaaccgggaaccag

SEQ ID NO: 46264 - DNA, 22 bp, Artificial Sequence
  Synthetic: FXN 3 forward 9:69046178-69046203; SpCas9
taagtaggaaaccgggaaccag

SEQ ID NO: 46265 - DNA, 21 bp, Artificial Sequence
  Synthetic: FXN 3 forward 9:69046179-69046203; SpCas9
aagtaggaaaccgggaaccag

SEQ ID NO: 46266 - DNA, 20 bp, Artificial Sequence
  Synthetic: FXN 3 forward 9:69046180-69046203; SpCas9
agtaggaaaccgggaaccag

SEQ ID NO: 46267 - DNA, 19 bp, Artificial Sequence
  Synthetic: FXN 3 forward 9:69046181-69046203; SpCas9
gtaggaaaccgggaaccag

SEQ ID NO: 46268 - DNA, 18 bp, Artificial Sequence
  Synthetic: FXN 3 forward 9:69046182-69046203; SpCas9
taggaaaccgggaaccag

SEQ ID NO: 46269 - DNA, 25 bp, Artificial Sequence
  Synthetic: FXN 3 forward 9:69046177-69046205; SpCas9
ctaagtaggaaaccgggaaccaggg

SEQ ID NO: 46270 - DNA, 24 bp, Artificial Sequence
  Synthetic: FXN 3 forward 9:69046178-69046205; SpCas9
taagtaggaaaccgggaaccaggg

SEQ ID NO: 46271 - DNA, 23 bp, Artificial Sequence
  Synthetic: FXN 3 forward 9:69046179-69046205; SpCas9
aagtaggaaaccgggaaccaggg

SEQ ID NO: 46272 - DNA, 22 bp, Artificial Sequence
  Synthetic: FXN 3 forward 9:69046180-69046205; SpCas9
agtaggaaaccgggaaccaggg

SEQ ID NO: 46273 - DNA, 21 bp, Artificial Sequence
  Synthetic: FXN 3 forward 9:69046181-69046205; SpCas9
gtaggaaaccgggaaccaggg

SEQ ID NO: 46274 - DNA, 20 bp, Artificial Sequence
  Synthetic: FXN 3 forward 9:69046182-69046205; SpCas9
taggaaaccgggaaccaggg

SEQ ID NO: 46275 - DNA, 19 bp, Artificial Sequence
  Synthetic: FXN 3 forward 9:69046183-69046205; SpCas9
aggaaaccgggaaccaggg

SEQ ID NO: 46276 - DNA, 18 bp, Artificial Sequence
  Synthetic: FXN 3 forward 9:69046184-69046205; SpCas9
ggaaaccgggaaccaggg

SEQ ID NO: 46277 - DNA, 25 bp, Artificial Sequence
  Synthetic: FXN 3 reverse 9:69046177-69046205; SpCas9
ctcccctggttcccggtttcctact

SEQ ID NO: 46278 - DNA, 24 bp, Artificial Sequence
  Synthetic: FXN 3 reverse 9:69046178-69046205; SpCas9
tcccctggttcccggtttcctact

SEQ ID NO: 46279 - DNA, 23 bp, Artificial Sequence
  Synthetic: FXN 3 reverse 9:69046179-69046205; SpCas9
cccctggttcccggtttcctact

SEQ ID NO: 46280 - DNA, 22 bp, Artificial Sequence
  Synthetic: FXN 3 reverse 9:69046180-69046205; SpCas9
ccctggttcccggtttcctact

SEQ ID NO: 46281 - DNA, 21 bp, Artificial Sequence
  Synthetic: FXN 3 reverse 9:69046181-69046205; SpCas9
cctggttcccggtttcctact

SEQ ID NO: 46282 - DNA, 20 bp, Artificial Sequence
  Synthetic: FXN 3 reverse 9:69046182-69046205; SpCas9
ctggttcccggtttcctact

SEQ ID NO: 46283 - DNA, 19 bp, Artificial Sequence
  Synthetic: FXN 3 reverse 9:69046183-69046205; SpCas9
tggttcccggtttcctact

SEQ ID NO: 46284 - DNA, 18 bp, Artificial Sequence
  Synthetic: FXN 3 reverse 9:69046184-69046205; SpCas9
ggttcccggtttcctact

SEQ ID NO: 46285 - DNA, 25 bp, Artificial Sequence
  Synthetic: FXN 3 forward 9:69046179-69046207; SpCas9
aagtaggaaaccgggaaccagggga

SEQ ID NO: 46286 - DNA, 24 bp, Artificial Sequence
  Synthetic: FXN 3 forward 9:69046180-69046207; SpCas9
agtaggaaaccgggaaccagggga

SEQ ID NO: 46287 - DNA, 23 bp, Artificial Sequence
  Synthetic: FXN 3 forward 9:69046181-69046207; SpCas9
gtaggaaaccgggaaccagggga

SEQ ID NO: 46288 - DNA, 22 bp, Artificial Sequence
  Synthetic: FXN 3 forward 9:69046182-69046207; SpCas9
taggaaaccgggaaccagggga

SEQ ID NO: 46289 - DNA, 21 bp, Artificial Sequence
  Synthetic: FXN 3 forward 9:69046183-69046207; SpCas9
aggaaaccgggaaccagggga

SEQ ID NO: 46290 - DNA, 20 bp, Artificial Sequence
  Synthetic: FXN 3 forward 9:69046184-69046207; SpCas9
ggaaaccgggaaccagggga

SEQ ID NO: 46291 - DNA, 19 bp, Artificial Sequence
  Synthetic: FXN 3 forward 9:69046185-69046207; SpCas9
gaaaccgggaaccagggga

SEQ ID NO: 46292 - DNA, 18 bp, Artificial Sequence
  Synthetic: FXN 3 forward 9:69046186-69046207; SpCas9
aaaccgggaaccagggga

SEQ ID NO: 46293 - DNA, 25 bp, Artificial Sequence
  Synthetic: FXN 3 forward 9:69046180-69046208; SpCas9
agtaggaaaccgggaaccaggggag

SEQ ID NO: 46294 - DNA, 24 bp, Artificial Sequence
  Synthetic: FXN 3 forward 9:69046181-69046208; SpCas9
gtaggaaaccgggaaccaggggag

SEQ ID NO: 46295 - DNA, 23 bp, Artificial Sequence
  Synthetic: FXN 3 forward 9:69046182-69046208; SpCas9
taggaaaccgggaaccaggggag

SEQ ID NO: 46296 - DNA, 22 bp, Artificial Sequence
  Synthetic: FXN 3 forward 9:69046183-69046208; SpCas9
aggaaaccgggaaccaggggag

SEQ ID NO: 46297 - DNA, 21 bp, Artificial Sequence
  Synthetic: FXN 3 forward 9:69046184-69046208; SpCas9
ggaaaccgggaaccaggggag

SEQ ID NO: 46298 - DNA, 20 bp, Artificial Sequence
  Synthetic: FXN 3 forward 9:69046185-69046208; SpCas9
gaaaccgggaaccaggggag

SEQ ID NO: 46299 - DNA, 19 bp, Artificial Sequence
  Synthetic: FXN 3 forward 9:69046186-69046208; SpCas9
aaaccgggaaccaggggag

SEQ ID NO: 46300 - DNA, 18 bp, Artificial Sequence
  Synthetic: FXN 3 forward 9:69046187-69046208; SpCas9
aaccgggaaccaggggag

SEQ ID NO: 46301 - DNA, 25 bp, Artificial Sequence
  Synthetic: FXN 3 forward 9:69046182-69046210; SpCas9
taggaaaccgggaaccaggggagag

SEQ ID NO: 46302 - DNA, 24 bp, Artificial Sequence
  Synthetic: FXN 3 forward 9:69046183-69046210; SpCas9
aggaaaccgggaaccaggggagag

SEQ ID NO: 46303 - DNA, 23 bp, Artificial Sequence
  Synthetic: FXN 3 forward 9:69046184-69046210; SpCas9
ggaaaccgggaaccaggggagag

SEQ ID NO: 46304 - DNA, 22 bp, Artificial Sequence
  Synthetic: FXN 3 forward 9:69046185-69046210; SpCas9
gaaaccgggaaccaggggagag

SEQ ID NO: 46305 - DNA, 21 bp, Artificial Sequence
  Synthetic: FXN 3 forward 9:69046186-69046210; SpCas9
aaaccgggaaccaggggagag

SEQ ID NO: 46306 - DNA, 20 bp, Artificial Sequence
  Synthetic: FXN 3 forward 9:69046187-69046210; SpCas9
aaccgggaaccaggggagag

SEQ ID NO: 46307 - DNA, 19 bp, Artificial Sequence
  Synthetic: FXN 3 forward 9:69046188-69046210; SpCas9
accgggaaccaggggagag

SEQ ID NO: 46308 - DNA, 18 bp, Artificial Sequence
  Synthetic: FXN 3 forward 9:69046189-69046210; SpCas9
ccgggaaccaggggagag

SEQ ID NO: 46309 - DNA, 25 bp, Artificial Sequence
  Synthetic: FXN 3 forward 9:69046185-69046213; SpCas9
gaaaccgggaaccaggggagaggag

SEQ ID NO: 46310 - DNA, 24 bp, Artificial Sequence
  Synthetic: FXN 3 forward 9:69046186-69046213; SpCas9
aaaccgggaaccaggggagaggag

SEQ ID NO: 46311 - DNA, 23 bp, Artificial Sequence
  Synthetic: FXN 3 forward 9:69046187-69046213; SpCas9
aaccgggaaccaggggagaggag

SEQ ID NO: 46312 - DNA, 22 bp, Artificial Sequence
  Synthetic: FXN 3 forward 9:69046188-69046213; SpCas9
accgggaaccaggggagaggag

SEQ ID NO: 46313 - DNA, 21 bp, Artificial Sequence
  Synthetic: FXN 3 forward 9:69046189-69046213; SpCas9
ccgggaaccaggggagaggag

SEQ ID NO: 46314 - DNA, 20 bp, Artificial Sequence
  Synthetic: FXN 3 forward 9:69046190-69046213; SpCas9
cgggaaccaggggagaggag

SEQ ID NO: 46315 - DNA, 19 bp, Artificial Sequence
  Synthetic: FXN 3 forward 9:69046191-69046213; SpCas9
gggaaccaggggagaggag

SEQ ID NO: 46316 - DNA, 18 bp, Artificial Sequence
  Synthetic: FXN 3 forward 9:69046192-69046213; SpCas9
ggaaccaggggagaggag

SEQ ID NO: 46317 - DNA, 25 bp, Artificial Sequence
  Synthetic: FXN 3 forward 9:69046187-69046215; SpCas9
aaccgggaaccaggggagaggagaa

SEQ ID NO: 46318 - DNA, 24 bp, Artificial Sequence
  Synthetic: FXN 3 forward 9:69046188-69046215; SpCas9
accgggaaccaggggagaggagaa

SEQ ID NO: 46319 - DNA, 23 bp, Artificial Sequence
  Synthetic: FXN 3 forward 9:69046189-69046215; SpCas9
ccgggaaccaggggagaggagaa

SEQ ID NO: 46320 - DNA, 22 bp, Artificial Sequence
  Synthetic: FXN 3 forward 9:69046190-69046215; SpCas9
cgggaaccaggggagaggagaa

SEQ ID NO: 46321 - DNA, 21 bp, Artificial Sequence
  Synthetic: FXN 3 forward 9:69046191-69046215; SpCas9
gggaaccaggggagaggagaa

SEQ ID NO: 46322 - DNA, 20 bp, Artificial Sequence
  Synthetic: FXN 3 forward 9:69046192-69046215; SpCas9
ggaaccaggggagaggagaa

SEQ ID NO: 46323 - DNA, 19 bp, Artificial Sequence
  Synthetic: FXN 3 forward 9:69046193-69046215; SpCas9
gaaccaggggagaggagaa

SEQ ID NO: 46324 - DNA, 18 bp, Artificial Sequence
  Synthetic: FXN 3 forward 9:69046194-69046215; SpCas9
aaccaggggagaggagaa

SEQ ID NO: 46325 - DNA, 25 bp, Artificial Sequence
  Synthetic: FXN 3 reverse 9:69046189-69046217; SpCas9
ttctcttctcctctcccctggttcc

SEQ ID NO: 46326 - DNA, 24 bp, Artificial Sequence
  Synthetic: FXN 3 reverse 9:69046190-69046217; SpCas9
tctcttctcctctcccctggttcc

SEQ ID NO: 46327 - DNA, 23 bp, Artificial Sequence
  Synthetic: FXN 3 reverse 9:69046191-69046217; SpCas9
ctcttctcctctcccctggttcc

SEQ ID NO: 46328 - DNA, 22 bp, Artificial Sequence
  Synthetic: FXN 3 reverse 9:69046192-69046217; SpCas9
tcttctcctctcccctggttcc

SEQ ID NO: 46329 - DNA, 21 bp, Artificial Sequence
  Synthetic: FXN 3 reverse 9:69046193-69046217; SpCas9
cttctcctctcccctggttcc

SEQ ID NO: 46330 - DNA, 20 bp, Artificial Sequence
  Synthetic: FXN 3 reverse 9:69046194-69046217; SpCas9
ttctcctctcccctggttcc

SEQ ID NO: 46331 - DNA, 19 bp, Artificial Sequence
  Synthetic: FXN 3 reverse 9:69046195-69046217; SpCas9
tctcctctcccctggttcc

SEQ ID NO: 46332 - DNA, 18 bp, Artificial Sequence
  Synthetic: FXN 3 reverse 9:69046196-69046217; SpCas9
ctcctctcccctggttcc

SEQ ID NO: 46333 - DNA, 25 bp, Artificial Sequence
  Synthetic: FXN 3 forward 9:69046190-69046218; SpCas9
cgggaaccaggggagaggagaagag

SEQ ID NO: 46334 - DNA, 24 bp, Artificial Sequence
  Synthetic: FXN 3 forward 9:69046191-69046218; SpCas9
gggaaccaggggagaggagaagag

SEQ ID NO: 46335 - DNA, 23 bp, Artificial Sequence
  Synthetic: FXN 3 forward 9:69046192-69046218; SpCas9
ggaaccaggggagaggagaagag

SEQ ID NO: 46336 - DNA, 22 bp, Artificial Sequence
  Synthetic: FXN 3 forward 9:69046193-69046218; SpCas9
gaaccaggggagaggagaagag

SEQ ID NO: 46337 - DNA, 21 bp, Artificial Sequence
  Synthetic: FXN 3 forward 9:69046194-69046218; SpCas9
aaccaggggagaggagaagag

SEQ ID NO: 46338 - DNA, 20 bp, Artificial Sequence
  Synthetic: FXN 3 forward 9:69046195-69046218; SpCas9
accaggggagaggagaagag

SEQ ID NO: 46339 - DNA, 19 bp, Artificial Sequence
  Synthetic: FXN 3 forward 9:69046196-69046218; SpCas9
ccaggggagaggagaagag

SEQ ID NO: 46340 - DNA, 18 bp, Artificial Sequence
  Synthetic: FXN 3 forward 9:69046197-69046218; SpCas9
caggggagaggagaagag

SEQ ID NO: 46341 - DNA, 25 bp, Artificial Sequence
  Synthetic: FXN 3 forward 9:69046192-69046220; SpCas9
ggaaccaggggagaggagaagagaa

SEQ ID NO: 46342 - DNA, 24 bp, Artificial Sequence
  Synthetic: FXN 3 forward 9:69046193-69046220; SpCas9
gaaccaggggagaggagaagagaa

SEQ ID NO: 46343 - DNA, 23 bp, Artificial Sequence
  Synthetic: FXN 3 forward 9:69046194-69046220; SpCas9
aaccaggggagaggagaagagaa

SEQ ID NO: 46344 - DNA, 22 bp, Artificial Sequence
  Synthetic: FXN 3 forward 9:69046195-69046220; SpCas9
accaggggagaggagaagagaa

SEQ ID NO: 46345 - DNA, 21 bp, Artificial Sequence
  Synthetic: FXN 3 forward 9:69046196-69046220; SpCas9
ccaggggagaggagaagagaa

SEQ ID NO: 46346 - DNA, 20 bp, Artificial Sequence
  Synthetic: FXN 3 forward 9:69046197-69046220; SpCas9
caggggagaggagaagagaa

SEQ ID NO: 46347 - DNA, 19 bp, Artificial Sequence
  Synthetic: FXN 3 forward 9:69046198-69046220; SpCas9
aggggagaggagaagagaa

SEQ ID NO: 46348 - DNA, 18 bp, Artificial Sequence
  Synthetic: FXN 3 forward 9:69046199-69046220; SpCas9
ggggagaggagaagagaa

SEQ ID NO: 46349 - DNA, 25 bp, Artificial Sequence
  Synthetic: FXN 3 forward 9:69046194-69046222; SpCas9
aaccaggggagaggagaagagaaga

SEQ ID NO: 46350 - DNA, 24 bp, Artificial Sequence
  Synthetic: FXN 3 forward 9:69046195-69046222; SpCas9
accaggggagaggagaagagaaga

SEQ ID NO: 46351 - DNA, 23 bp, Artificial Sequence
  Synthetic: FXN 3 forward 9:69046196-69046222; SpCas9
ccaggggagaggagaagagaaga

SEQ ID NO: 46352 - DNA, 22 bp, Artificial Sequence
  Synthetic: FXN 3 forward 9:69046197-69046222; SpCas9
caggggagaggagaagagaaga

SEQ ID NO: 46353 - DNA, 21 bp, Artificial Sequence
  Synthetic: FXN 3 forward 9:69046198-69046222; SpCas9
aggggagaggagaagagaaga

SEQ ID NO: 46354 - DNA, 20 bp, Artificial Sequence
  Synthetic: FXN 3 forward 9:69046199-69046222; SpCas9
ggggagaggagaagagaaga

SEQ ID NO: 46355 - DNA, 19 bp, Artificial Sequence
  Synthetic: FXN 3 forward 9:69046200-69046222; SpCas9
gggagaggagaagagaaga

SEQ ID NO: 46356 - DNA, 18 bp, Artificial Sequence
  Synthetic: FXN 3 forward 9:69046201-69046222; SpCas9
ggagaggagaagagaaga

SEQ ID NO: 46357 - DNA, 25 bp, Artificial Sequence
  Synthetic: FXN 3 forward 9:69046195-69046223; SpCas9
accaggggagaggagaagagaagag

SEQ ID NO: 46358 - DNA, 24 bp, Artificial Sequence
  Synthetic: FXN 3 forward 9:69046196-69046223; SpCas9
ccaggggagaggagaagagaagag

SEQ ID NO: 46359 - DNA, 23 bp, Artificial Sequence
  Synthetic: FXN 3 forward 9:69046197-69046223; SpCas9
caggggagaggagaagagaagag

SEQ ID NO: 46360 - DNA, 22 bp, Artificial Sequence
  Synthetic: FXN 3 forward 9:69046198-69046223; SpCas9
aggggagaggagaagagaagag

SEQ ID NO: 46361 - DNA, 21 bp, Artificial Sequence
  Synthetic: FXN 3 forward 9:69046199-69046223; SpCas9
ggggagaggagaagagaagag

SEQ ID NO: 46362 - DNA, 20 bp, Artificial Sequence
  Synthetic: FXN 3 forward 9:69046200-69046223; SpCas9
gggagaggagaagagaagag

SEQ ID NO: 46363 - DNA, 19 bp, Artificial Sequence
  Synthetic: FXN 3 forward 9:69046201-69046223; SpCas9
ggagaggagaagagaagag

SEQ ID NO: 46364 - DNA, 18 bp, Artificial Sequence
  Synthetic: FXN 3 forward 9:69046202-69046223; SpCas9
gagaggagaagagaagag

SEQ ID NO: 46365 - DNA, 25 bp, Artificial Sequence
  Synthetic: FXN 3 reverse 9:69046196-69046224; SpCas9
tcctctcttctcttctcctctcccc

SEQ ID NO: 46366 - DNA, 24 bp, Artificial Sequence
  Synthetic: FXN 3 reverse 9:69046197-69046224; SpCas9
cctctcttctcttctcctctcccc

SEQ ID NO: 46367 - DNA, 23 bp, Artificial Sequence
  Synthetic: FXN 3 reverse 9:69046198-69046224; SpCas9
ctctcttctcttctcctctcccc

SEQ ID NO: 46368 - DNA, 22 bp, Artificial Sequence
  Synthetic: FXN 3 reverse 9:69046199-69046224; SpCas9
tctcttctcttctcctctcccc

SEQ ID NO: 46369 - DNA, 21 bp, Artificial Sequence
  Synthetic: FXN 3 reverse 9:69046200-69046224; SpCas9
ctcttctcttctcctctcccc

SEQ ID NO: 46370 - DNA, 20 bp, Artificial Sequence
  Synthetic: FXN 3 reverse 9:69046201-69046224; SpCas9
tcttctcttctcctctcccc

SEQ ID NO: 46371 - DNA, 19 bp, Artificial Sequence
  Synthetic: FXN 3 reverse 9:69046202-69046224; SpCas9
cttctcttctcctctcccc

SEQ ID NO: 46372 - DNA, 18 bp, Artificial Sequence
  Synthetic: FXN 3 reverse 9:69046203-69046224; SpCas9
ttctcttctcctctcccc

SEQ ID NO: 46373 - DNA, 25 bp, Artificial Sequence
  Synthetic: FXN 3 forward 9:69046210-69046238; SpCas9
aagagaagagaggataatttttttt

SEQ ID NO: 46374 - DNA, 24 bp, Artificial Sequence
  Synthetic: FXN 3 forward 9:69046211-69046238; SpCas9
agagaagagaggataatttttttt

SEQ ID NO: 46375 - DNA, 23 bp, Artificial Sequence
  Synthetic: FXN 3 forward 9:69046212-69046238; SpCas9
gagaagagaggataatttttttt

SEQ ID NO: 46376 - DNA, 22 bp, Artificial Sequence
  Synthetic: FXN 3 forward 9:69046213-69046238; SpCas9
agaagagaggataatttttttt

SEQ ID NO: 46377 - DNA, 21 bp, Artificial Sequence
  Synthetic: FXN 3 forward 9:69046214-69046238; SpCas9
gaagagaggataatttttttt

SEQ ID NO: 46378 - DNA, 20 bp, Artificial Sequence
  Synthetic: FXN 3 forward 9:69046215-69046238; SpCas9
aagagaggataatttttttt

SEQ ID NO: 46379 - DNA, 19 bp, Artificial Sequence
  Synthetic: FXN 3 forward 9:69046216-69046238; SpCas9
agagaggataatttttttt

SEQ ID NO: 46380 - DNA, 18 bp, Artificial Sequence
  Synthetic: FXN 3 forward 9:69046217-69046238; SpCas9
gagaggataatttttttt

SEQ ID NO: 46381 - DNA, 25 bp, Artificial Sequence
  Synthetic: FXN 3 forward 9:69046215-69046243; SpCas9
aagagaggataattttttttaagaa

SEQ ID NO: 46382 - DNA, 24 bp, Artificial Sequence
  Synthetic: FXN 3 forward 9:69046216-69046243; SpCas9
agagaggataattttttttaagaa

SEQ ID NO: 46383 - DNA, 23 bp, Artificial Sequence
  Synthetic: FXN 3 forward 9:69046217-69046243; SpCas9
gagaggataattttttttaagaa

SEQ ID NO: 46384 - DNA, 22 bp, Artificial Sequence
  Synthetic: FXN 3 forward 9:69046218-69046243; SpCas9
agaggataattttttttaagaa

SEQ ID NO: 46385 - DNA, 21 bp, Artificial Sequence
  Synthetic: FXN 3 forward 9:69046219-69046243; SpCas9
gaggataattttttttaagaa

SEQ ID NO: 46386 - DNA, 20 bp, Artificial Sequence
  Synthetic: FXN 3 forward 9:69046220-69046243; SpCas9
aggataattttttttaagaa

SEQ ID NO: 46387 - DNA, 19 bp, Artificial Sequence
  Synthetic: FXN 3 forward 9:69046221-69046243; SpCas9
ggataattttttttaagaa

SEQ ID NO: 46388 - DNA, 18 bp, Artificial Sequence
  Synthetic: FXN 3 forward 9:69046222-69046243; SpCas9
gataattttttttaagaa

SEQ ID NO: 46389 - DNA, 25 bp, Artificial Sequence
  Synthetic: FXN 3 forward 9:69046237-69046265; SpCas9
gaaaagcaacatattccctttttct

SEQ ID NO: 46390 - DNA, 24 bp, Artificial Sequence
  Synthetic: FXN 3 forward 9:69046238-69046265; SpCas9
aaaagcaacatattccctttttct

SEQ ID NO: 46391 - DNA, 23 bp, Artificial Sequence
  Synthetic: FXN 3 forward 9:69046239-69046265; SpCas9
aaagcaacatattccctttttct

SEQ ID NO: 46392 - DNA, 22 bp, Artificial Sequence
  Synthetic: FXN 3 forward 9:69046240-69046265; SpCas9
aagcaacatattccctttttct

SEQ ID NO: 46393 - DNA, 21 bp, Artificial Sequence
  Synthetic: FXN 3 forward 9:69046241-69046265; SpCas9
agcaacatattccctttttct

SEQ ID NO: 46394 - DNA, 20 bp, Artificial Sequence
  Synthetic: FXN 3 forward 9:69046242-69046265; SpCas9
gcaacatattccctttttct

SEQ ID NO: 46395 - DNA, 19 bp, Artificial Sequence
  Synthetic: FXN 3 forward 9:69046243-69046265; SpCas9
caacatattccctttttct

SEQ ID NO: 46396 - DNA, 18 bp, Artificial Sequence
  Synthetic: FXN 3 forward 9:69046244-69046265; SpCas9
aacatattccctttttct

SEQ ID NO: 46397 - DNA, 25 bp, Artificial Sequence
  Synthetic: FXN 3 forward 9:69046246-69046274; SpCas9
catattccctttttcttagaaaaaa

SEQ ID NO: 46398 - DNA, 24 bp, Artificial Sequence
  Synthetic: FXN 3 forward 9:69046247-69046274; SpCas9
atattccctttttcttagaaaaaa

SEQ ID NO: 46399 - DNA, 23 bp, Artificial Sequence
  Synthetic: FXN 3 forward 9:69046248-69046274; SpCas9
tattccctttttcttagaaaaaa

SEQ ID NO: 46400 - DNA, 22 bp, Artificial Sequence
  Synthetic: FXN 3 forward 9:69046249-69046274; SpCas9
attccctttttcttagaaaaaa

SEQ ID NO: 46401 - DNA, 21 bp, Artificial Sequence
  Synthetic: FXN 3 forward 9:69046250-69046274; SpCas9
ttccctttttcttagaaaaaa

SEQ ID NO: 46402 - DNA, 20 bp, Artificial Sequence
  Synthetic: FXN 3 forward 9:69046251-69046274; SpCas9
tccctttttcttagaaaaaa

SEQ ID NO: 46403 - DNA, 19 bp, Artificial Sequence
  Synthetic: FXN 3 forward 9:69046252-69046274; SpCas9
ccctttttcttagaaaaaa

SEQ ID NO: 46404 - DNA, 18 bp, Artificial Sequence
  Synthetic: FXN 3 forward 9:69046253-69046274; SpCas9
cctttttcttagaaaaaa

SEQ ID NO: 46405 - DNA, 25 bp, Artificial Sequence
  Synthetic: FXN 3 forward 9:69046248-69046276; SpCas9
tattccctttttcttagaaaaaatg

SEQ ID NO: 46406 - DNA, 24 bp, Artificial Sequence
  Synthetic: FXN 3 forward 9:69046249-69046276; SpCas9
attccctttttcttagaaaaaatg

SEQ ID NO: 46407 - DNA, 23 bp, Artificial Sequence
  Synthetic: FXN 3 forward 9:69046250-69046276; SpCas9
ttccctttttcttagaaaaaatg

SEQ ID NO: 46408 - DNA, 22 bp, Artificial Sequence
  Synthetic: FXN 3 forward 9:69046251-69046276; SpCas9
tccctttttcttagaaaaaatg

SEQ ID NO: 46409 - DNA, 21 bp, Artificial Sequence
  Synthetic: FXN 3 forward 9:69046252-69046276; SpCas9
ccctttttcttagaaaaaatg

SEQ ID NO: 46410 - DNA, 20 bp, Artificial Sequence
  Synthetic: FXN 3 forward 9:69046253-69046276; SpCas9
cctttttcttagaaaaaatg

SEQ ID NO: 46411 - DNA, 19 bp, Artificial Sequence
  Synthetic: FXN 3 forward 9:69046254-69046276; SpCas9
ctttttcttagaaaaaatg

SEQ ID NO: 46412 - DNA, 18 bp, Artificial Sequence
  Synthetic: FXN 3 forward 9:69046255-69046276; SpCas9
tttttcttagaaaaaatg

SEQ ID NO: 46413 - DNA, 25 bp, Artificial Sequence
  Synthetic: FXN 3 reverse 9:69046252-69046280; SpCas9
agtgctccattttttctaagaaaaa

SEQ ID NO: 46414 - DNA, 24 bp, Artificial Sequence
  Synthetic: FXN 3 reverse 9:69046253-69046280; SpCas9
gtgctccattttttctaagaaaaa

SEQ ID NO: 46415 - DNA, 23 bp, Artificial Sequence
  Synthetic: FXN 3 reverse 9:69046254-69046280; SpCas9
tgctccattttttctaagaaaaa

SEQ ID NO: 46416 - DNA, 22 bp, Artificial Sequence
  Synthetic: FXN 3 reverse 9:69046255-69046280; SpCas9
gctccattttttctaagaaaaa

SEQ ID NO: 46417 - DNA, 21 bp, Artificial Sequence
  Synthetic: FXN 3 reverse 9:69046256-69046280; SpCas9
ctccattttttctaagaaaaa

SEQ ID NO: 46418 - DNA, 20 bp, Artificial Sequence
  Synthetic: FXN 3 reverse 9:69046257-69046280; SpCas9
tccattttttctaagaaaaa

SEQ ID NO: 46419 - DNA, 19 bp, Artificial Sequence
  Synthetic: FXN 3 reverse 9:69046258-69046280; SpCas9
ccattttttctaagaaaaa

SEQ ID NO: 46420 - DNA, 18 bp, Artificial Sequence
  Synthetic: FXN 3 reverse 9:69046259-69046280; SpCas9
cattttttctaagaaaaa

SEQ ID NO: 46421 - DNA, 25 bp, Artificial Sequence
  Synthetic: FXN 3 reverse 9:69046253-69046281; SpCas9
gagtgctccattttttctaagaaaa

SEQ ID NO: 46422 - DNA, 24 bp, Artificial Sequence
  Synthetic: FXN 3 reverse 9:69046254-69046281; SpCas9
agtgctccattttttctaagaaaa

SEQ ID NO: 46423 - DNA, 23 bp, Artificial Sequence
  Synthetic: FXN 3 reverse 9:69046255-69046281; SpCas9
gtgctccattttttctaagaaaa

SEQ ID NO: 46424 - DNA, 22 bp, Artificial Sequence
  Synthetic: FXN 3 reverse 9:69046256-69046281; SpCas9
tgctccattttttctaagaaaa

SEQ ID NO: 46425 - DNA, 21 bp, Artificial Sequence
  Synthetic: FXN 3 reverse 9:69046257-69046281; SpCas9
gctccattttttctaagaaaa

SEQ ID NO: 46426 - DNA, 20 bp, Artificial Sequence
  Synthetic: FXN 3 reverse 9:69046258-69046281; SpCas9
ctccattttttctaagaaaa

SEQ ID NO: 46427 - DNA, 19 bp, Artificial Sequence
  Synthetic: FXN 3 reverse 9:69046259-69046281; SpCas9
tccattttttctaagaaaa

SEQ ID NO: 46428 - DNA, 18 bp, Artificial Sequence
  Synthetic: FXN 3 reverse 9:69046260-69046281; SpCas9
ccattttttctaagaaaa

SEQ ID NO: 46429 - DNA, 25 bp, Artificial Sequence
  Synthetic: FXN 3 reverse 9:69046254-69046282; SpCas9
cgagtgctccattttttctaagaaa

SEQ ID NO: 46430 - DNA, 24 bp, Artificial Sequence
  Synthetic: FXN 3 reverse 9:69046255-69046282; SpCas9
gagtgctccattttttctaagaaa

SEQ ID NO: 46431 - DNA, 23 bp, Artificial Sequence
  Synthetic: FXN 3 reverse 9:69046256-69046282; SpCas9
agtgctccattttttctaagaaa

SEQ ID NO: 46432 - DNA, 22 bp, Artificial Sequence
  Synthetic: FXN 3 reverse 9:69046257-69046282; SpCas9
gtgctccattttttctaagaaa

SEQ ID NO: 46433 - DNA, 21 bp, Artificial Sequence
  Synthetic: FXN 3 reverse 9:69046258-69046282; SpCas9
tgctccattttttctaagaaa

SEQ ID NO: 46434 - DNA, 20 bp, Artificial Sequence
  Synthetic: FXN 3 reverse 9:69046259-69046282; SpCas9
gctccattttttctaagaaa

SEQ ID NO: 46435 - DNA, 19 bp, Artificial Sequence
  Synthetic: FXN 3 reverse 9:69046260-69046282; SpCas9
ctccattttttctaagaaa

SEQ ID NO: 46436 - DNA, 18 bp, Artificial Sequence
  Synthetic: FXN 3 reverse 9:69046261-69046282; SpCas9
tccattttttctaagaaa

SEQ ID NO: 46437 - DNA, 25 bp, Artificial Sequence
  Synthetic: FXN 3 forward 9:69046255-69046283; SpCas9
tttttcttagaaaaaatggagcact

SEQ ID NO: 46438 - DNA, 24 bp, Artificial Sequence
  Synthetic: FXN 3 forward 9:69046256-69046283; SpCas9
ttttcttagaaaaaatggagcact

SEQ ID NO: 46439 - DNA, 23 bp, Artificial Sequence
  Synthetic: FXN 3 forward 9:69046257-69046283; SpCas9
tttcttagaaaaaatggagcact

SEQ ID NO: 46440 - DNA, 22 bp, Artificial Sequence
  Synthetic: FXN 3 forward 9:69046258-69046283; SpCas9
ttcttagaaaaaatggagcact

SEQ ID NO: 46441 - DNA, 21 bp, Artificial Sequence
  Synthetic: FXN 3 forward 9:69046259-69046283; SpCas9
tcttagaaaaaatggagcact

SEQ ID NO: 46442 - DNA, 20 bp, Artificial Sequence
  Synthetic: FXN 3 forward 9:69046260-69046283; SpCas9
cttagaaaaaatggagcact

SEQ ID NO: 46443 - DNA, 19 bp, Artificial Sequence
  Synthetic: FXN 3 forward 9:69046261-69046283; SpCas9
ttagaaaaaatggagcact

SEQ ID NO: 46444 - DNA, 18 bp, Artificial Sequence
  Synthetic: FXN 3 forward 9:69046262-69046283; SpCas9
tagaaaaaatggagcact

SEQ ID NO: 46445 - DNA, 25 bp, Artificial Sequence
  Synthetic: FXN 3 reverse 9:69046260-69046288; SpCas9
tgtaaccgagtgctccattttttct

SEQ ID NO: 46446 - DNA, 24 bp, Artificial Sequence
  Synthetic: FXN 3 reverse 9:69046261-69046288; SpCas9
gtaaccgagtgctccattttttct

SEQ ID NO: 46447 - DNA, 23 bp, Artificial Sequence
  Synthetic: FXN 3 reverse 9:69046262-69046288; SpCas9
taaccgagtgctccattttttct

SEQ ID NO: 46448 - DNA, 22 bp, Artificial Sequence
  Synthetic: FXN 3 reverse 9:69046263-69046288; SpCas9
aaccgagtgctccattttttct

SEQ ID NO: 46449 - DNA, 21 bp, Artificial Sequence
  Synthetic: FXN 3 reverse 9:69046264-69046288; SpCas9
accgagtgctccattttttct

SEQ ID NO: 46450 - DNA, 20 bp, Artificial Sequence
  Synthetic: FXN 3 reverse 9:69046265-69046288; SpCas9
ccgagtgctccattttttct

SEQ ID NO: 46451 - DNA, 19 bp, Artificial Sequence
  Synthetic: FXN 3 reverse 9:69046266-69046288; SpCas9
cgagtgctccattttttct

SEQ ID NO: 46452 - DNA, 18 bp, Artificial Sequence
  Synthetic: FXN 3 reverse 9:69046267-69046288; SpCas9
gagtgctccattttttct

SEQ ID NO: 46453 - DNA, 25 bp, Artificial Sequence
  Synthetic: FXN 3 forward 9:69046261-69046289; SpCas9
ttagaaaaaatggagcactcggtta

SEQ ID NO: 46454 - DNA, 24 bp, Artificial Sequence
  Synthetic: FXN 3 forward 9:69046262-69046289; SpCas9
tagaaaaaatggagcactcggtta

SEQ ID NO: 46455 - DNA, 23 bp, Artificial Sequence
  Synthetic: FXN 3 forward 9:69046263-69046289; SpCas9
agaaaaaatggagcactcggtta

SEQ ID NO: 46456 - DNA, 22 bp, Artificial Sequence
  Synthetic: FXN 3 forward 9:69046264-69046289; SpCas9
gaaaaaatggagcactcggtta

SEQ ID NO: 46457 - DNA, 21 bp, Artificial Sequence
  Synthetic: FXN 3 forward 9:69046265-69046289; SpCas9
aaaaaatggagcactcggtta

SEQ ID NO: 46458 - DNA, 20 bp, Artificial Sequence
  Synthetic: FXN 3 forward 9:69046266-69046289; SpCas9
aaaaatggagcactcggtta

SEQ ID NO: 46459 - DNA, 19 bp, Artificial Sequence
  Synthetic: FXN 3 forward 9:69046267-69046289; SpCas9
aaaatggagcactcggtta

SEQ ID NO: 46460 - DNA, 18 bp, Artificial Sequence
  Synthetic: FXN 3 forward 9:69046268-69046289; SpCas9
aaatggagcactcggtta

SEQ ID NO: 46461 - DNA, 25 bp, Artificial Sequence
  Synthetic: FXN 3 forward 9:69046262-69046290; SpCas9
tagaaaaaatggagcactcggttac

SEQ ID NO: 46462 - DNA, 24 bp, Artificial Sequence
  Synthetic: FXN 3 forward 9:69046263-69046290; SpCas9
agaaaaaatggagcactcggttac

SEQ ID NO: 46463 - DNA, 23 bp, Artificial Sequence
  Synthetic: FXN 3 forward 9:69046264-69046290; SpCas9
gaaaaaatggagcactcggttac

SEQ ID NO: 46464 - DNA, 22 bp, Artificial Sequence
  Synthetic: FXN 3 forward 9:69046265-69046290; SpCas9
aaaaaatggagcactcggttac

SEQ ID NO: 46465 - DNA, 21 bp, Artificial Sequence
  Synthetic: FXN 3 forward 9:69046266-69046290; SpCas9
aaaaatggagcactcggttac

SEQ ID NO: 46466 - DNA, 20 bp, Artificial Sequence
  Synthetic: FXN 3 forward 9:69046267-69046290; SpCas9
aaaatggagcactcggttac

SEQ ID NO: 46467 - DNA, 19 bp, Artificial Sequence
  Synthetic: FXN 3 forward 9:69046268-69046290; SpCas9
aaatggagcactcggttac

SEQ ID NO: 46468 - DNA, 18 bp, Artificial Sequence
  Synthetic: FXN 3 forward 9:69046269-69046290; SpCas9
aatggagcactcggttac

SEQ ID NO: 46469 - DNA, 25 bp, Artificial Sequence
  Synthetic: FXN 3 forward 9:69046275-69046303; SpCas9
gcactcggttacaggcactcgaatg

SEQ ID NO: 46470 - DNA, 24 bp, Artificial Sequence
  Synthetic: FXN 3 forward 9:69046276-69046303; SpCas9
cactcggttacaggcactcgaatg

SEQ ID NO: 46471 - DNA, 23 bp, Artificial Sequence
  Synthetic: FXN 3 forward 9:69046277-69046303; SpCas9
actcggttacaggcactcgaatg

SEQ ID NO: 46472 - DNA, 22 bp, Artificial Sequence
  Synthetic: FXN 3 forward 9:69046278-69046303; SpCas9
ctcggttacaggcactcgaatg

SEQ ID NO: 46473 - DNA, 21 bp, Artificial Sequence
  Synthetic: FXN 3 forward 9:69046279-69046303; SpCas9
tcggttacaggcactcgaatg

SEQ ID NO: 46474 - DNA, 20 bp, Artificial Sequence
  Synthetic: FXN 3 forward 9:69046280-69046303; SpCas9
cggttacaggcactcgaatg

SEQ ID NO: 46475 - DNA, 19 bp, Artificial Sequence
  Synthetic: FXN 3 forward 9:69046281-69046303; SpCas9
ggttacaggcactcgaatg

SEQ ID NO: 46476 - DNA, 18 bp, Artificial Sequence
  Synthetic: FXN 3 forward 9:69046282-69046303; SpCas9
gttacaggcactcgaatg

SEQ ID NO: 46477 - DNA, 25 bp, Artificial Sequence
  Synthetic: FXN 3 forward 9:69046278-69046306; SpCas9
ctcggttacaggcactcgaatgtag

SEQ ID NO: 46478 - DNA, 24 bp, Artificial Sequence
  Synthetic: FXN 3 forward 9:69046279-69046306; SpCas9
tcggttacaggcactcgaatgtag

SEQ ID NO: 46479 - DNA, 23 bp, Artificial Sequence
  Synthetic: FXN 3 forward 9:69046280-69046306; SpCas9
cggttacaggcactcgaatgtag

SEQ ID NO: 46480 - DNA, 22 bp, Artificial Sequence
  Synthetic: FXN 3 forward 9:69046281-69046306; SpCas9
ggttacaggcactcgaatgtag

SEQ ID NO: 46481 - DNA, 21 bp, Artificial Sequence
  Synthetic: FXN 3 forward 9:69046282-69046306; SpCas9
gttacaggcactcgaatgtag

SEQ ID NO: 46482 - DNA, 20 bp, Artificial Sequence
  Synthetic: FXN 3 forward 9:69046283-69046306; SpCas9
ttacaggcactcgaatgtag

SEQ ID NO: 46483 - DNA, 19 bp, Artificial Sequence
  Synthetic: FXN 3 forward 9:69046284-69046306; SpCas9
tacaggcactcgaatgtag

SEQ ID NO: 46484 - DNA, 18 bp, Artificial Sequence
  Synthetic: FXN 3 forward 9:69046285-69046306; SpCas9
acaggcactcgaatgtag

SEQ ID NO: 46485 - DNA, 25 bp, Artificial Sequence
  Synthetic: FXN 3 reverse 9:69046278-69046306; SpCas9
cttctacattcgagtgcctgtaacc

SEQ ID NO: 46486 - DNA, 24 bp, Artificial Sequence
  Synthetic: FXN 3 reverse 9:69046279-69046306; SpCas9
ttctacattcgagtgcctgtaacc

SEQ ID NO: 46487 - DNA, 23 bp, Artificial Sequence
  Synthetic: FXN 3 reverse 9:69046280-69046306; SpCas9
tctacattcgagtgcctgtaacc

SEQ ID NO: 46488 - DNA, 22 bp, Artificial Sequence
  Synthetic: FXN 3 reverse 9:69046281-69046306; SpCas9
ctacattcgagtgcctgtaacc

SEQ ID NO: 46489 - DNA, 21 bp, Artificial Sequence
  Synthetic: FXN 3 reverse 9:69046282-69046306; SpCas9
tacattcgagtgcctgtaacc

SEQ ID NO: 46490 - DNA, 20 bp, Artificial Sequence
  Synthetic: FXN 3 reverse 9:69046283-69046306; SpCas9
acattcgagtgcctgtaacc

SEQ ID NO: 46491 - DNA, 19 bp, Artificial Sequence
  Synthetic: FXN 3 reverse 9:69046284-69046306; SpCas9
cattcgagtgcctgtaacc

SEQ ID NO: 46492 - DNA, 18 bp, Artificial Sequence
  Synthetic: FXN 3 reverse 9:69046285-69046306; SpCas9
attcgagtgcctgtaacc

SEQ ID NO: 46493 - DNA, 25 bp, Artificial Sequence
  Synthetic: FXN 3 forward 9:69046281-69046309; SpCas9
ggttacaggcactcgaatgtagaag

SEQ ID NO: 46494 - DNA, 24 bp, Artificial Sequence
  Synthetic: FXN 3 forward 9:69046282-69046309; SpCas9
gttacaggcactcgaatgtagaag

SEQ ID NO: 46495 - DNA, 23 bp, Artificial Sequence
  Synthetic: FXN 3 forward 9:69046283-69046309; SpCas9
ttacaggcactcgaatgtagaag

SEQ ID NO: 46496 - DNA, 22 bp, Artificial Sequence
  Synthetic: FXN 3 forward 9:69046284-69046309; SpCas9
tacaggcactcgaatgtagaag

SEQ ID NO: 46497 - DNA, 21 bp, Artificial Sequence
  Synthetic: FXN 3 forward 9:69046285-69046309; SpCas9
acaggcactcgaatgtagaag

SEQ ID NO: 46498 - DNA, 20 bp, Artificial Sequence
  Synthetic: FXN 3 forward 9:69046286-69046309; SpCas9
caggcactcgaatgtagaag

SEQ ID NO: 46499 - DNA, 19 bp, Artificial Sequence
  Synthetic: FXN 3 forward 9:69046287-69046309; SpCas9
aggcactcgaatgtagaag

SEQ ID NO: 46500 - DNA, 18 bp, Artificial Sequence
  Synthetic: FXN 3 forward 9:69046288-69046309; SpCas9
ggcactcgaatgtagaag

SEQ ID NO: 46501 - DNA, 25 bp, Artificial Sequence
  Synthetic: FXN 3 reverse 9:69046292-69046320; SpCas9
tttatatattgctacttctacattc

SEQ ID NO: 46502 - DNA, 24 bp, Artificial Sequence
  Synthetic: FXN 3 reverse 9:69046293-69046320; SpCas9
ttatatattgctacttctacattc

SEQ ID NO: 46503 - DNA, 23 bp, Artificial Sequence
  Synthetic: FXN 3 reverse 9:69046294-69046320; SpCas9
tatatattgctacttctacattc

SEQ ID NO: 46504 - DNA, 22 bp, Artificial Sequence
  Synthetic: FXN 3 reverse 9:69046295-69046320; SpCas9
atatattgctacttctacattc

SEQ ID NO: 46505 - DNA, 21 bp, Artificial Sequence
  Synthetic: FXN 3 reverse 9:69046296-69046320; SpCas9
tatattgctacttctacattc

SEQ ID NO: 46506 - DNA, 20 bp, Artificial Sequence
  Synthetic: FXN 3 reverse 9:69046297-69046320; SpCas9
atattgctacttctacattc

SEQ ID NO: 46507 - DNA, 19 bp, Artificial Sequence
  Synthetic: FXN 3 reverse 9:69046298-69046320; SpCas9
tattgctacttctacattc

SEQ ID NO: 46508 - DNA, 18 bp, Artificial Sequence
  Synthetic: FXN 3 reverse 9:69046299-69046320; SpCas9
attgctacttctacattc

SEQ ID NO: 46509 - DNA, 25 bp, Artificial Sequence
  Synthetic: FXN 3 forward 9:69046306-69046334; SpCas9
tagcaatatataaattatgcattaa

SEQ ID NO: 46510 - DNA, 24 bp, Artificial Sequence
  Synthetic: FXN 3 forward 9:69046307-69046334; SpCas9
agcaatatataaattatgcattaa

SEQ ID NO: 46511 - DNA, 23 bp, Artificial Sequence
  Synthetic: FXN 3 forward 9:69046308-69046334; SpCas9
gcaatatataaattatgcattaa

SEQ ID NO: 46512 - DNA, 22 bp, Artificial Sequence
  Synthetic: FXN 3 forward 9:69046309-69046334; SpCas9
caatatataaattatgcattaa

SEQ ID NO: 46513 - DNA, 21 bp, Artificial Sequence
  Synthetic: FXN 3 forward 9:69046310-69046334; SpCas9
aatatataaattatgcattaa

SEQ ID NO: 46514 - DNA, 20 bp, Artificial Sequence
  Synthetic: FXN 3 forward 9:69046311-69046334; SpCas9
atatataaattatgcattaa

SEQ ID NO: 46515 - DNA, 19 bp, Artificial Sequence
  Synthetic: FXN 3 forward 9:69046312-69046334; SpCas9
tatataaattatgcattaa

SEQ ID NO: 46516 - DNA, 18 bp, Artificial Sequence
  Synthetic: FXN 3 forward 9:69046313-69046334; SpCas9
atataaattatgcattaa

SEQ ID NO: 46517 - DNA, 25 bp, Artificial Sequence
  Synthetic: FXN 3 forward 9:69046307-69046335; SpCas9
agcaatatataaattatgcattaat

SEQ ID NO: 46518 - DNA, 24 bp, Artificial Sequence
  Synthetic: FXN 3 forward 9:69046308-69046335; SpCas9
gcaatatataaattatgcattaat

SEQ ID NO: 46519 - DNA, 23 bp, Artificial Sequence
  Synthetic: FXN 3 forward 9:69046309-69046335; SpCas9
caatatataaattatgcattaat

SEQ ID NO: 46520 - DNA, 22 bp, Artificial Sequence
  Synthetic: FXN 3 forward 9:69046310-69046335; SpCas9
aatatataaattatgcattaat

SEQ ID NO: 46521 - DNA, 21 bp, Artificial Sequence
  Synthetic: FXN 3 forward 9:69046311-69046335; SpCas9
atatataaattatgcattaat

SEQ ID NO: 46522 - DNA, 20 bp, Artificial Sequence
  Synthetic: FXN 3 forward 9:69046312-69046335; SpCas9
tatataaattatgcattaat

SEQ ID NO: 46523 - DNA, 19 bp, Artificial Sequence
  Synthetic: FXN 3 forward 9:69046313-69046335; SpCas9
atataaattatgcattaat

SEQ ID NO: 46524 - DNA, 18 bp, Artificial Sequence
  Synthetic: FXN 3 forward 9:69046314-69046335; SpCas9
tataaattatgcattaat

SEQ ID NO: 46525 - DNA, 25 bp, Artificial Sequence
  Synthetic: FXN 3 forward 9:69046328-69046356; SpCas9
taatgggttataattcactgaaaaa

SEQ ID NO: 46526 - DNA, 24 bp, Artificial Sequence
  Synthetic: FXN 3 forward 9:69046329-69046356; SpCas9
aatgggttataattcactgaaaaa

SEQ ID NO: 46527 - DNA, 23 bp, Artificial Sequence
  Synthetic: FXN 3 forward 9:69046330-69046356; SpCas9
atgggttataattcactgaaaaa

SEQ ID NO: 46528 - DNA, 22 bp, Artificial Sequence
  Synthetic: FXN 3 forward 9:69046331-69046356; SpCas9
tgggttataattcactgaaaaa

SEQ ID NO: 46529 - DNA, 21 bp, Artificial Sequence
  Synthetic: FXN 3 forward 9:69046332-69046356; SpCas9
gggttataattcactgaaaaa

SEQ ID NO: 46530 - DNA, 20 bp, Artificial Sequence
  Synthetic: FXN 3 forward 9:69046333-69046356; SpCas9
ggttataattcactgaaaaa

SEQ ID NO: 46531 - DNA, 19 bp, Artificial Sequence
  Synthetic: FXN 3 forward 9:69046334-69046356; SpCas9
gttataattcactgaaaaa

SEQ ID NO: 46532 - DNA, 18 bp, Artificial Sequence
  Synthetic: FXN 3 forward 9:69046335-69046356; SpCas9
ttataattcactgaaaaa

SEQ ID NO: 46533 - DNA, 25 bp, Artificial Sequence
  Synthetic: FXN 3 reverse 9:69046345-69046373; SpCas9
agttaagaagtacgttactattttt

SEQ ID NO: 46534 - DNA, 24 bp, Artificial Sequence
  Synthetic: FXN 3 reverse 9:69046346-69046373; SpCas9
gttaagaagtacgttactattttt

SEQ ID NO: 46535 - DNA, 23 bp, Artificial Sequence
  Synthetic: FXN 3 reverse 9:69046347-69046373; SpCas9
ttaagaagtacgttactattttt

SEQ ID NO: 46536 - DNA, 22 bp, Artificial Sequence
  Synthetic: FXN 3 reverse 9:69046348-69046373; SpCas9
taagaagtacgttactattttt

SEQ ID NO: 46537 - DNA, 21 bp, Artificial Sequence
  Synthetic: FXN 3 reverse 9:69046349-69046373; SpCas9
aagaagtacgttactattttt

SEQ ID NO: 46538 - DNA, 20 bp, Artificial Sequence
  Synthetic: FXN 3 reverse 9:69046350-69046373; SpCas9
agaagtacgttactattttt

SEQ ID NO: 46539 - DNA, 19 bp, Artificial Sequence
  Synthetic: FXN 3 reverse 9:69046351-69046373; SpCas9
gaagtacgttactattttt

SEQ ID NO: 46540 - DNA, 18 bp, Artificial Sequence
  Synthetic: FXN 3 reverse 9:69046352-69046373; SpCas9
aagtacgttactattttt

SEQ ID NO: 46541 - DNA, 25 bp, Artificial Sequence
  Synthetic: FXN 3 forward 9:69046349-69046377; SpCas9
aaaatagtaacgtacttcttaactt

SEQ ID NO: 46542 - DNA, 24 bp, Artificial Sequence
  Synthetic: FXN 3 forward 9:69046350-69046377; SpCas9
aaatagtaacgtacttcttaactt

SEQ ID NO: 46543 - DNA, 23 bp, Artificial Sequence
  Synthetic: FXN 3 forward 9:69046351-69046377; SpCas9
aatagtaacgtacttcttaactt

SEQ ID NO: 46544 - DNA, 22 bp, Artificial Sequence
  Synthetic: FXN 3 forward 9:69046352-69046377; SpCas9
atagtaacgtacttcttaactt

SEQ ID NO: 46545 - DNA, 21 bp, Artificial Sequence
  Synthetic: FXN 3 forward 9:69046353-69046377; SpCas9
tagtaacgtacttcttaactt

SEQ ID NO: 46546 - DNA, 20 bp, Artificial Sequence
  Synthetic: FXN 3 forward 9:69046354-69046377; SpCas9
agtaacgtacttcttaactt

SEQ ID NO: 46547 - DNA, 19 bp, Artificial Sequence
  Synthetic: FXN 3 forward 9:69046355-69046377; SpCas9
gtaacgtacttcttaactt

SEQ ID NO: 46548 - DNA, 18 bp, Artificial Sequence
  Synthetic: FXN 3 forward 9:69046356-69046377; SpCas9
taacgtacttcttaactt

SEQ ID NO: 46549 - DNA, 25 bp, Artificial Sequence
  Synthetic: FXN 3 forward 9:69046356-69046384; SpCas9
taacgtacttcttaactttggcttt

SEQ ID NO: 46550 - DNA, 24 bp, Artificial Sequence
  Synthetic: FXN 3 forward 9:69046357-69046384; SpCas9
aacgtacttcttaactttggcttt

SEQ ID NO: 46551 - DNA, 23 bp, Artificial Sequence
  Synthetic: FXN 3 forward 9:69046358-69046384; SpCas9
acgtacttcttaactttggcttt

SEQ ID NO: 46552 - DNA, 22 bp, Artificial Sequence
  Synthetic: FXN 3 forward 9:69046359-69046384; SpCas9
cgtacttcttaactttggcttt

SEQ ID NO: 46553 - DNA, 21 bp, Artificial Sequence
  Synthetic: FXN 3 forward 9:69046360-69046384; SpCas9
gtacttcttaactttggcttt

SEQ ID NO: 46554 - DNA, 20 bp, Artificial Sequence
  Synthetic: FXN 3 forward 9:69046361-69046384; SpCas9
tacttcttaactttggcttt

SEQ ID NO: 46555 - DNA, 19 bp, Artificial Sequence
  Synthetic: FXN 3 forward 9:69046362-69046384; SpCas9
acttcttaactttggcttt

SEQ ID NO: 46556 - DNA, 18 bp, Artificial Sequence
  Synthetic: FXN 3 forward 9:69046363-69046384; SpCas9
cttcttaactttggcttt

SEQ ID NO: 46557 - DNA, 25 bp, Artificial Sequence
  Synthetic: FXN 3 forward 9:69046358-69046386; SpCas9
acgtacttcttaactttggctttca

SEQ ID NO: 46558 - DNA, 24 bp, Artificial Sequence
  Synthetic: FXN 3 forward 9:69046359-69046386; SpCas9
cgtacttcttaactttggctttca

SEQ ID NO: 46559 - DNA, 23 bp, Artificial Sequence
  Synthetic: FXN 3 forward 9:69046360-69046386; SpCas9
gtacttcttaactttggctttca

SEQ ID NO: 46560 - DNA, 22 bp, Artificial Sequence
  Synthetic: FXN 3 forward 9:69046361-69046386; SpCas9
tacttcttaactttggctttca

SEQ ID NO: 46561 - DNA, 21 bp, Artificial Sequence
  Synthetic: FXN 3 forward 9:69046362-69046386; SpCas9
acttcttaactttggctttca

SEQ ID NO: 46562 - DNA, 20 bp, Artificial Sequence
  Synthetic: FXN 3 forward 9:69046363-69046386; SpCas9
cttcttaactttggctttca

SEQ ID NO: 46563 - DNA, 19 bp, Artificial Sequence
  Synthetic: FXN 3 forward 9:69046364-69046386; SpCas9
ttcttaactttggctttca

SEQ ID NO: 46564 - DNA, 18 bp, Artificial Sequence
  Synthetic: FXN 3 forward 9:69046365-69046386; SpCas9
tcttaactttggctttca

SEQ ID NO: 46565 - DNA, 25 bp, Artificial Sequence
  Synthetic: FXN 3 reverse 9:69046363-69046391; SpCas9
tcgaactctgaaagccaaagttaag

SEQ ID NO: 46566 - DNA, 24 bp, Artificial Sequence
  Synthetic: FXN 3 reverse 9:69046364-69046391; SpCas9
cgaactctgaaagccaaagttaag

SEQ ID NO: 46567 - DNA, 23 bp, Artificial Sequence
  Synthetic: FXN 3 reverse 9:69046365-69046391; SpCas9
gaactctgaaagccaaagttaag

SEQ ID NO: 46568 - DNA, 22 bp, Artificial Sequence
  Synthetic: FXN 3 reverse 9:69046366-69046391; SpCas9
aactctgaaagccaaagttaag

SEQ ID NO: 46569 - DNA, 21 bp, Artificial Sequence
  Synthetic: FXN 3 reverse 9:69046367-69046391; SpCas9
actctgaaagccaaagttaag

SEQ ID NO: 46570 - DNA, 20 bp, Artificial Sequence
  Synthetic: FXN 3 reverse 9:69046368-69046391; SpCas9
ctctgaaagccaaagttaag

SEQ ID NO: 46571 - DNA, 19 bp, Artificial Sequence
  Synthetic: FXN 3 reverse 9:69046369-69046391; SpCas9
tctgaaagccaaagttaag

SEQ ID NO: 46572 - DNA, 18 bp, Artificial Sequence
  Synthetic: FXN 3 reverse 9:69046370-69046391; SpCas9
ctgaaagccaaagttaag

SEQ ID NO: 46573 - DNA, 25 bp, Artificial Sequence
  Synthetic: FXN 3 reverse 9:69046366-69046394; SpCas9
ggttcgaactctgaaagccaaagtt

SEQ ID NO: 46574 - DNA, 24 bp, Artificial Sequence
  Synthetic: FXN 3 reverse 9:69046367-69046394; SpCas9
gttcgaactctgaaagccaaagtt

SEQ ID NO: 46575 - DNA, 23 bp, Artificial Sequence
  Synthetic: FXN 3 reverse 9:69046368-69046394; SpCas9
ttcgaactctgaaagccaaagtt

SEQ ID NO: 46576 - DNA, 22 bp, Artificial Sequence
  Synthetic: FXN 3 reverse 9:69046369-69046394; SpCas9
tcgaactctgaaagccaaagtt

SEQ ID NO: 46577 - DNA, 21 bp, Artificial Sequence
  Synthetic: FXN 3 reverse 9:69046370-69046394; SpCas9
cgaactctgaaagccaaagtt

SEQ ID NO: 46578 - DNA, 20 bp, Artificial Sequence
  Synthetic: FXN 3 reverse 9:69046371-69046394; SpCas9
gaactctgaaagccaaagtt

SEQ ID NO: 46579 - DNA, 19 bp, Artificial Sequence
  Synthetic: FXN 3 reverse 9:69046372-69046394; SpCas9
aactctgaaagccaaagtt

SEQ ID NO: 46580 - DNA, 18 bp, Artificial Sequence
  Synthetic: FXN 3 reverse 9:69046373-69046394; SpCas9
actctgaaagccaaagtt

SEQ ID NO: 46581 - DNA, 25 bp, Artificial Sequence
  Synthetic: FXN 3 reverse 9:69046371-69046399; SpCas9
acgttggttcgaactctgaaagcca

SEQ ID NO: 46582 - DNA, 24 bp, Artificial Sequence
  Synthetic: FXN 3 reverse 9:69046372-69046399; SpCas9
cgttggttcgaactctgaaagcca

SEQ ID NO: 46583 - DNA, 23 bp, Artificial Sequence
  Synthetic: FXN 3 reverse 9:69046373-69046399; SpCas9
gttggttcgaactctgaaagcca

SEQ ID NO: 46584 - DNA, 22 bp, Artificial Sequence
  Synthetic: FXN 3 reverse 9:69046374-69046399; SpCas9
ttggttcgaactctgaaagcca

SEQ ID NO: 46585 - DNA, 21 bp, Artificial Sequence
  Synthetic: FXN 3 reverse 9:69046375-69046399; SpCas9
tggttcgaactctgaaagcca

SEQ ID NO: 46586 - DNA, 20 bp, Artificial Sequence
  Synthetic: FXN 3 reverse 9:69046376-69046399; SpCas9
ggttcgaactctgaaagcca

SEQ ID NO: 46587 - DNA, 19 bp, Artificial Sequence
  Synthetic: FXN 3 reverse 9:69046377-69046399; SpCas9
gttcgaactctgaaagcca

SEQ ID NO: 46588 - DNA, 18 bp, Artificial Sequence
  Synthetic: FXN 3 reverse 9:69046378-69046399; SpCas9
ttcgaactctgaaagcca

SEQ ID NO: 46589 - DNA, 25 bp, Artificial Sequence
  Synthetic: FXN 3 reverse 9:69046377-69046405; SpCas9
gaggccacgttggttcgaactctga

SEQ ID NO: 46590 - DNA, 24 bp, Artificial Sequence
  Synthetic: FXN 3 reverse 9:69046378-69046405; SpCas9
aggccacgttggttcgaactctga

SEQ ID NO: 46591 - DNA, 23 bp, Artificial Sequence
  Synthetic: FXN 3 reverse 9:69046379-69046405; SpCas9
ggccacgttggttcgaactctga

SEQ ID NO: 46592 - DNA, 22 bp, Artificial Sequence
  Synthetic: FXN 3 reverse 9:69046380-69046405; SpCas9
gccacgttggttcgaactctga

SEQ ID NO: 46593 - DNA, 21 bp, Artificial Sequence
  Synthetic: FXN 3 reverse 9:69046381-69046405; SpCas9
ccacgttggttcgaactctga

SEQ ID NO: 46594 - DNA, 20 bp, Artificial Sequence
  Synthetic: FXN 3 reverse 9:69046382-69046405; SpCas9
cacgttggttcgaactctga

SEQ ID NO: 46595 - DNA, 19 bp, Artificial Sequence
  Synthetic: FXN 3 reverse 9:69046383-69046405; SpCas9
acgttggttcgaactctga

SEQ ID NO: 46596 - DNA, 18 bp, Artificial Sequence
  Synthetic: FXN 3 reverse 9:69046384-69046405; SpCas9
cgttggttcgaactctga

SEQ ID NO: 46597 - DNA, 18 bp, Artificial Sequence
  Synthetic: FXN 5 forward 9:69036137-69036159; As/LbCpf1
cactggcttctgctttcc

SEQ ID NO: 46598 - DNA, 19 bp, Artificial Sequence
  Synthetic: FXN 5 forward 9:69036137-69036160; As/LbCpf1
cactggcttctgctttccg

SEQ ID NO: 46599 - DNA, 20 bp, Artificial Sequence
  Synthetic: FXN 5 forward 9:69036137-69036161; As/LbCpf1
cactggcttctgctttccga

SEQ ID NO: 46600 - DNA, 21 bp, Artificial Sequence
  Synthetic: FXN 5 forward 9:69036137-69036162; As/LbCpf1
cactggcttctgctttccgaa

SEQ ID NO: 46601 - DNA, 22 bp, Artificial Sequence
  Synthetic: FXN 5 forward 9:69036137-69036163; As/LbCpf1
cactggcttctgctttccgaag

SEQ ID NO: 46602 - DNA, 23 bp, Artificial Sequence
  Synthetic: FXN 5 forward 9:69036137-69036164; As/LbCpf1
cactggcttctgctttccgaagg

SEQ ID NO: 46603 - DNA, 24 bp, Artificial Sequence
  Synthetic: FXN 5 forward 9:69036137-69036165; As/LbCpf1
cactggcttctgctttccgaagga

SEQ ID NO: 46604 - DNA, 25 bp, Artificial Sequence
  Synthetic: FXN 5 forward 9:69036137-69036166; As/LbCpf1
cactggcttctgctttccgaaggaa

SEQ ID NO: 46605 - DNA, 18 bp, Artificial Sequence
  Synthetic: FXN 5 reverse 9:69036138-69036160; As/LbCpf1
cttcggaaagcagaagcc

SEQ ID NO: 46606 - DNA, 19 bp, Artificial Sequence
  Synthetic: FXN 5 reverse 9:69036138-69036161; As/LbCpf1
cttcggaaagcagaagcca

SEQ ID NO: 46607 - DNA, 20 bp, Artificial Sequence
  Synthetic: FXN 5 reverse 9:69036138-69036162; As/LbCpf1
cttcggaaagcagaagccag

SEQ ID NO: 46608 - DNA, 21 bp, Artificial Sequence
  Synthetic: FXN 5 reverse 9:69036138-69036163; As/LbCpf1
cttcggaaagcagaagccagt

SEQ ID NO: 46609 - DNA, 22 bp, Artificial Sequence
  Synthetic: FXN 5 reverse 9:69036138-69036164; As/LbCpf1
cttcggaaagcagaagccagtg

SEQ ID NO: 46610 - DNA, 23 bp, Artificial Sequence
  Synthetic: FXN 5 reverse 9:69036138-69036165; As/LbCpf1
cttcggaaagcagaagccagtgt

SEQ ID NO: 46611 - DNA, 24 bp, Artificial Sequence
  Synthetic: FXN 5 reverse 9:69036138-69036166; As/LbCpf1
cttcggaaagcagaagccagtgta

SEQ ID NO: 46612 - DNA, 25 bp, Artificial Sequence
  Synthetic: FXN 5 reverse 9:69036138-69036167; As/LbCpf1
cttcggaaagcagaagccagtgtaa

SEQ ID NO: 46613 - DNA, 18 bp, Artificial Sequence
  Synthetic: FXN 5 reverse 9:69036139-69036161; As/LbCpf1
ccttcggaaagcagaagc

SEQ ID NO: 46614 - DNA, 19 bp, Artificial Sequence
  Synthetic: FXN 5 reverse 9:69036139-69036162; As/LbCpf1
ccttcggaaagcagaagcc

SEQ ID NO: 46615 - DNA, 20 bp, Artificial Sequence
  Synthetic: FXN 5 reverse 9:69036139-69036163; As/LbCpf1
ccttcggaaagcagaagcca

SEQ ID NO: 46616 - DNA, 21 bp, Artificial Sequence
  Synthetic: FXN 5 reverse 9:69036139-69036164; As/LbCpf1
ccttcggaaagcagaagccag

SEQ ID NO: 46617 - DNA, 22 bp, Artificial Sequence
  Synthetic: FXN 5 reverse 9:69036139-69036165; As/LbCpf1
ccttcggaaagcagaagccagt

SEQ ID NO: 46618 - DNA, 23 bp, Artificial Sequence
  Synthetic: FXN 5 reverse 9:69036139-69036166; As/LbCpf1
ccttcggaaagcagaagccagtg

SEQ ID NO: 46619 - DNA, 24 bp, Artificial Sequence
  Synthetic: FXN 5 reverse 9:69036139-69036167; As/LbCpf1
ccttcggaaagcagaagccagtgt

SEQ ID NO: 46620 - DNA, 25 bp, Artificial Sequence
  Synthetic: FXN 5 reverse 9:69036139-69036168; As/LbCpf1
ccttcggaaagcagaagccagtgta

SEQ ID NO: 46621 - DNA, 18 bp, Artificial Sequence
  Synthetic: FXN 5 forward 9:69036154-69036176; As/LbCpf1
cgaaggaaaaggggacat

SEQ ID NO: 46622 - DNA, 19 bp, Artificial Sequence
  Synthetic: FXN 5 forward 9:69036154-69036177; As/LbCpf1
cgaaggaaaaggggacatt

SEQ ID NO: 46623 - DNA, 20 bp, Artificial Sequence
  Synthetic: FXN 5 forward 9:69036154-69036178; As/LbCpf1
cgaaggaaaaggggacattt

SEQ ID NO: 46624 - DNA, 21 bp, Artificial Sequence
  Synthetic: FXN 5 forward 9:69036154-69036179; As/LbCpf1
cgaaggaaaaggggacatttt

SEQ ID NO: 46625 - DNA, 22 bp, Artificial Sequence
  Synthetic: FXN 5 forward 9:69036154-69036180; As/LbCpf1
cgaaggaaaaggggacattttg

SEQ ID NO: 46626 - DNA, 23 bp, Artificial Sequence
  Synthetic: FXN 5 forward 9:69036154-69036181; As/LbCpf1
cgaaggaaaaggggacattttgt

SEQ ID NO: 46627 - DNA, 24 bp, Artificial Sequence
  Synthetic: FXN 5 forward 9:69036154-69036182; As/LbCpf1
cgaaggaaaaggggacattttgtc

SEQ ID NO: 46628 - DNA, 25 bp, Artificial Sequence
  Synthetic: FXN 5 forward 9:69036154-69036183; As/LbCpf1
cgaaggaaaaggggacattttgtcc

SEQ ID NO: 46629 - DNA, 18 bp, Artificial Sequence
  Synthetic: FXN 5 forward 9:69036175-69036197; As/LbCpf1
gtcctgcggtgcgactgc

SEQ ID NO: 46630 - DNA, 19 bp, Artificial Sequence
  Synthetic: FXN 5 forward 9:69036175-69036198; As/LbCpf1
gtcctgcggtgcgactgcg

SEQ ID NO: 46631 - DNA, 20 bp, Artificial Sequence
  Synthetic: FXN 5 forward 9:69036175-69036199; As/LbCpf1
gtcctgcggtgcgactgcgg

SEQ ID NO: 46632 - DNA, 21 bp, Artificial Sequence
  Synthetic: FXN 5 forward 9:69036175-69036200; As/LbCpf1
gtcctgcggtgcgactgcggg

SEQ ID NO: 46633 - DNA, 22 bp, Artificial Sequence
  Synthetic: FXN 5 forward 9:69036175-69036201; As/LbCpf1
gtcctgcggtgcgactgcgggt

SEQ ID NO: 46634 - DNA, 23 bp, Artificial Sequence
  Synthetic: FXN 5 forward 9:69036175-69036202; As/LbCpf1
gtcctgcggtgcgactgcgggtc

SEQ ID NO: 46635 - DNA, 24 bp, Artificial Sequence
  Synthetic: FXN 5 forward 9:69036175-69036203; As/LbCpf1
gtcctgcggtgcgactgcgggtca

SEQ ID NO: 46636 - DNA, 25 bp, Artificial Sequence
  Synthetic: FXN 5 forward 9:69036175-69036204; As/LbCpf1
gtcctgcggtgcgactgcgggtcaa

SEQ ID NO: 46637 - DNA, 18 bp, Artificial Sequence
  Synthetic: FXN 5 forward 9:69036176-69036198; As/LbCpf1
tcctgcggtgcgactgcg

SEQ ID NO: 46638 - DNA, 19 bp, Artificial Sequence
  Synthetic: FXN 5 forward 9:69036176-69036199; As/LbCpf1
tcctgcggtgcgactgcgg

SEQ ID NO: 46639 - DNA, 20 bp, Artificial Sequence
  Synthetic: FXN 5 forward 9:69036176-69036200; As/LbCpf1
tcctgcggtgcgactgcggg

SEQ ID NO: 46640 - DNA, 21 bp, Artificial Sequence
  Synthetic: FXN 5 forward 9:69036176-69036201; As/LbCpf1
tcctgcggtgcgactgcgggt

SEQ ID NO: 46641 - DNA, 22 bp, Artificial Sequence
  Synthetic: FXN 5 forward 9:69036176-69036202; As/LbCpf1
tcctgcggtgcgactgcgggtc

SEQ ID NO: 46642 - DNA, 23 bp, Artificial Sequence
  Synthetic: FXN 5 forward 9:69036176-69036203; As/LbCpf1
tcctgcggtgcgactgcgggtca

SEQ ID NO: 46643 - DNA, 24 bp, Artificial Sequence
  Synthetic: FXN 5 forward 9:69036176-69036204; As/LbCpf1
tcctgcggtgcgactgcgggtcaa

SEQ ID NO: 46644 - DNA, 25 bp, Artificial Sequence
  Synthetic: FXN 5 forward 9:69036176-69036205; As/LbCpf1
tcctgcggtgcgactgcgggtcaag

SEQ ID NO: 46645 - DNA, 18 bp, Artificial Sequence
  Synthetic: FXN 5 forward 9:69036297-69036319; As/LbCpf1
agtaatattaatagatgg

SEQ ID NO: 46646 - DNA, 19 bp, Artificial Sequence
  Synthetic: FXN 5 forward 9:69036297-69036320; As/LbCpf1
agtaatattaatagatggt

SEQ ID NO: 46647 - DNA, 20 bp, Artificial Sequence
  Synthetic: FXN 5 forward 9:69036297-69036321; As/LbCpf1
agtaatattaatagatggta

SEQ ID NO: 46648 - DNA, 21 bp, Artificial Sequence
  Synthetic: FXN 5 forward 9:69036297-69036322; As/LbCpf1
agtaatattaatagatggtat

SEQ ID NO: 46649 - DNA, 22 bp, Artificial Sequence
  Synthetic: FXN 5 forward 9:69036297-69036323; As/LbCpf1
agtaatattaatagatggtatc

SEQ ID NO: 46650 - DNA, 23 bp, Artificial Sequence
  Synthetic: FXN 5 forward 9:69036297-69036324; As/LbCpf1
agtaatattaatagatggtatct

SEQ ID NO: 46651 - DNA, 24 bp, Artificial Sequence
  Synthetic: FXN 5 forward 9:69036297-69036325; As/LbCpf1
agtaatattaatagatggtatctg

SEQ ID NO: 46652 - DNA, 25 bp, Artificial Sequence
  Synthetic: FXN 5 forward 9:69036297-69036326; As/LbCpf1
agtaatattaatagatggtatctgc

SEQ ID NO: 46653 - DNA, 18 bp, Artificial Sequence
  Synthetic: FXN 5 forward 9:69036396-69036418; As/LbCpf1
cgcgcacgggcgcgcgca

SEQ ID NO: 46654 - DNA, 19 bp, Artificial Sequence
  Synthetic: FXN 5 forward 9:69036396-69036419; As/LbCpf1
cgcgcacgggcgcgcgcac

SEQ ID NO: 46655 - DNA, 20 bp, Artificial Sequence
  Synthetic: FXN 5 forward 9:69036396-69036420; As/LbCpf1
cgcgcacgggcgcgcgcaca

SEQ ID NO: 46656 - DNA, 21 bp, Artificial Sequence
  Synthetic: FXN 5 forward 9:69036396-69036421; As/LbCpf1
cgcgcacgggcgcgcgcacac

SEQ ID NO: 46657 - DNA, 22 bp, Artificial Sequence
  Synthetic: FXN 5 forward 9:69036396-69036422; As/LbCpf1
cgcgcacgggcgcgcgcacacc

SEQ ID NO: 46658 - DNA, 23 bp, Artificial Sequence
  Synthetic: FXN 5 forward 9:69036396-69036423; As/LbCpf1
cgcgcacgggcgcgcgcacacct

SEQ ID NO: 46659 - DNA, 24 bp, Artificial Sequence
  Synthetic: FXN 5 forward 9:69036396-69036424; As/LbCpf1
cgcgcacgggcgcgcgcacaccta

SEQ ID NO: 46660 - DNA, 25 bp, Artificial Sequence
  Synthetic: FXN 5 forward 9:69036396-69036425; As/LbCpf1
cgcgcacgggcgcgcgcacacctaa

SEQ ID NO: 46661 - DNA, 18 bp, Artificial Sequence
  Synthetic: FXN 5 forward 9:69036427-69036449; As/LbCpf1
caaggctggatttttttg

SEQ ID NO: 46662 - DNA, 19 bp, Artificial Sequence
  Synthetic: FXN 5 forward 9:69036427-69036450; As/LbCpf1
caaggctggatttttttga

SEQ ID NO: 46663 - DNA, 20 bp, Artificial Sequence
  Synthetic: FXN 5 forward 9:69036427-69036451; As/LbCpf1
caaggctggatttttttgaa

SEQ ID NO: 46664 - DNA, 21 bp, Artificial Sequence
  Synthetic: FXN 5 forward 9:69036427-69036452; As/LbCpf1
caaggctggatttttttgaac

SEQ ID NO: 46665 - DNA, 22 bp, Artificial Sequence
  Synthetic: FXN 5 forward 9:69036427-69036453; As/LbCpf1
caaggctggatttttttgaacg

SEQ ID NO: 46666 - DNA, 23 bp, Artificial Sequence
  Synthetic: FXN 5 forward 9:69036427-69036454; As/LbCpf1
caaggctggatttttttgaacga

SEQ ID NO: 46667 - DNA, 24 bp, Artificial Sequence
  Synthetic: FXN 5 forward 9:69036427-69036455; As/LbCpf1
caaggctggatttttttgaacgaa

SEQ ID NO: 46668 - DNA, 25 bp, Artificial Sequence
  Synthetic: FXN 5 forward 9:69036427-69036456; As/LbCpf1
caaggctggatttttttgaacgaaa

SEQ ID NO: 46669 - DNA, 18 bp, Artificial Sequence
  Synthetic: FXN 5 reverse 9:69036427-69036449; As/LbCpf1
gttcaaaaaaatccagcc

SEQ ID NO: 46670 - DNA, 19 bp, Artificial Sequence
  Synthetic: FXN 5 reverse 9:69036427-69036450; As/LbCpf1
gttcaaaaaaatccagcct

SEQ ID NO: 46671 - DNA, 20 bp, Artificial Sequence
  Synthetic: FXN 5 reverse 9:69036427-69036451; As/LbCpf1
gttcaaaaaaatccagcctt

SEQ ID NO: 46672 - DNA, 21 bp, Artificial Sequence
  Synthetic: FXN 5 reverse 9:69036427-69036452; As/LbCpf1
gttcaaaaaaatccagccttg

SEQ ID NO: 46673 - DNA, 22 bp, Artificial Sequence
  Synthetic: FXN 5 reverse 9:69036427-69036453; As/LbCpf1
gttcaaaaaaatccagccttga

SEQ ID NO: 46674 - DNA, 23 bp, Artificial Sequence
  Synthetic: FXN 5 reverse 9:69036427-69036454; As/LbCpf1
gttcaaaaaaatccagccttgaa

SEQ ID NO: 46675 - DNA, 24 bp, Artificial Sequence
  Synthetic: FXN 5 reverse 9:69036427-69036455; As/LbCpf1
gttcaaaaaaatccagccttgaaa

SEQ ID NO: 46676 - DNA, 25 bp, Artificial Sequence
  Synthetic: FXN 5 reverse 9:69036427-69036456; As/LbCpf1
gttcaaaaaaatccagccttgaaaa

SEQ ID NO: 46677 - DNA, 18 bp, Artificial Sequence
  Synthetic: FXN 5 forward 9:69036428-69036450; As/LbCpf1
aaggctggatttttttga

SEQ ID NO: 46678 - DNA, 19 bp, Artificial Sequence
  Synthetic: FXN 5 forward 9:69036428-69036451; As/LbCpf1
aaggctggatttttttgaa

SEQ ID NO: 46679 - DNA, 20 bp, Artificial Sequence
  Synthetic: FXN 5 forward 9:69036428-69036452; As/LbCpf1
aaggctggatttttttgaac

SEQ ID NO: 46680 - DNA, 21 bp, Artificial Sequence
  Synthetic: FXN 5 forward 9:69036428-69036453; As/LbCpf1
aaggctggatttttttgaacg

SEQ ID NO: 46681 - DNA, 22 bp, Artificial Sequence
  Synthetic: FXN 5 forward 9:69036428-69036454; As/LbCpf1
aaggctggatttttttgaacga

SEQ ID NO: 46682 - DNA, 23 bp, Artificial Sequence
  Synthetic: FXN 5 forward 9:69036428-69036455; As/LbCpf1
aaggctggatttttttgaacgaa

SEQ ID NO: 46683 - DNA, 24 bp, Artificial Sequence
  Synthetic: FXN 5 forward 9:69036428-69036456; As/LbCpf1
aaggctggatttttttgaacgaaa

SEQ ID NO: 46684 - DNA, 25 bp, Artificial Sequence
  Synthetic: FXN 5 forward 9:69036428-69036457; As/LbCpf1
aaggctggatttttttgaacgaaat

SEQ ID NO: 46685 - DNA, 18 bp, Artificial Sequence
  Synthetic: FXN 5 forward 9:69036441-69036463; As/LbCpf1
tttgaacgaaatgctttc

SEQ ID NO: 46686 - DNA, 19 bp, Artificial Sequence
  Synthetic: FXN 5 forward 9:69036441-69036464; As/LbCpf1
tttgaacgaaatgctttcc

SEQ ID NO: 46687 - DNA, 20 bp, Artificial Sequence
  Synthetic: FXN 5 forward 9:69036441-69036465; As/LbCpf1
tttgaacgaaatgctttcct

SEQ ID NO: 46688 - DNA, 21 bp, Artificial Sequence
  Synthetic: FXN 5 forward 9:69036441-69036466; As/LbCpf1
tttgaacgaaatgctttcctg

SEQ ID NO: 46689 - DNA, 22 bp, Artificial Sequence
  Synthetic: FXN 5 forward 9:69036441-69036467; As/LbCpf1
tttgaacgaaatgctttcctgg

SEQ ID NO: 46690 - DNA, 23 bp, Artificial Sequence
  Synthetic: FXN 5 forward 9:69036441-69036468; As/LbCpf1
tttgaacgaaatgctttcctgga

SEQ ID NO: 46691 - DNA, 24 bp, Artificial Sequence
  Synthetic: FXN 5 forward 9:69036441-69036469; As/LbCpf1
tttgaacgaaatgctttcctggaa

SEQ ID NO: 46692 - DNA, 25 bp, Artificial Sequence
  Synthetic: FXN 5 forward 9:69036441-69036470; As/LbCpf1
tttgaacgaaatgctttcctggaac

SEQ ID NO: 46693 - DNA, 18 bp, Artificial Sequence
  Synthetic: FXN 5 forward 9:69036442-69036464; As/LbCpf1
ttgaacgaaatgctttcc

SEQ ID NO: 46694 - DNA, 19 bp, Artificial Sequence
  Synthetic: FXN 5 forward 9:69036442-69036465; As/LbCpf1
ttgaacgaaatgctttcct

SEQ ID NO: 46695 - DNA, 20 bp, Artificial Sequence
  Synthetic: FXN 5 forward 9:69036442-69036466; As/LbCpf1
ttgaacgaaatgctttcctg

SEQ ID NO: 46696 - DNA, 21 bp, Artificial Sequence
  Synthetic: FXN 5 forward 9:69036442-69036467; As/LbCpf1
ttgaacgaaatgctttcctgg

SEQ ID NO: 46697 - DNA, 22 bp, Artificial Sequence
  Synthetic: FXN 5 forward 9:69036442-69036468; As/LbCpf1
ttgaacgaaatgctttcctgga

SEQ ID NO: 46698 - DNA, 23 bp, Artificial Sequence
  Synthetic: FXN 5 forward 9:69036442-69036469; As/LbCpf1
ttgaacgaaatgctttcctggaa

SEQ ID NO: 46699 - DNA, 24 bp, Artificial Sequence
  Synthetic: FXN 5 forward 9:69036442-69036470; As/LbCpf1
ttgaacgaaatgctttcctggaac

SEQ ID NO: 46700 - DNA, 25 bp, Artificial Sequence
  Synthetic: FXN 5 forward 9:69036442-69036471; As/LbCpf1
ttgaacgaaatgctttcctggaacg

SEQ ID NO: 46701 - DNA, 18 bp, Artificial Sequence
  Synthetic: FXN 5 forward 9:69036443-69036465; As/LbCpf1
tgaacgaaatgctttcct

SEQ ID NO: 46702 - DNA, 19 bp, Artificial Sequence
  Synthetic: FXN 5 forward 9:69036443-69036466; As/LbCpf1
tgaacgaaatgctttcctg

SEQ ID NO: 46703 - DNA, 20 bp, Artificial Sequence
  Synthetic: FXN 5 forward 9:69036443-69036467; As/LbCpf1
tgaacgaaatgctttcctgg

SEQ ID NO: 46704 - DNA, 21 bp, Artificial Sequence
  Synthetic: FXN 5 forward 9:69036443-69036468; As/LbCpf1
tgaacgaaatgctttcctgga

SEQ ID NO: 46705 - DNA, 22 bp, Artificial Sequence
  Synthetic: FXN 5 forward 9:69036443-69036469; As/LbCpf1
tgaacgaaatgctttcctggaa

SEQ ID NO: 46706 - DNA, 23 bp, Artificial Sequence
  Synthetic: FXN 5 forward 9:69036443-69036470; As/LbCpf1
tgaacgaaatgctttcctggaac

SEQ ID NO: 46707 - DNA, 24 bp, Artificial Sequence
  Synthetic: FXN 5 forward 9:69036443-69036471; As/LbCpf1
tgaacgaaatgctttcctggaacg

SEQ ID NO: 46708 - DNA, 25 bp, Artificial Sequence
  Synthetic: FXN 5 forward 9:69036443-69036472; As/LbCpf1
tgaacgaaatgctttcctggaacga

SEQ ID NO: 46709 - DNA, 18 bp, Artificial Sequence
  Synthetic: FXN 5 forward 9:69036444-69036466; As/LbCpf1
gaacgaaatgctttcctg

SEQ ID NO: 46710 - DNA, 19 bp, Artificial Sequence
  Synthetic: FXN 5 forward 9:69036444-69036467; As/LbCpf1
gaacgaaatgctttcctgg

SEQ ID NO: 46711 - DNA, 20 bp, Artificial Sequence
  Synthetic: FXN 5 forward 9:69036444-69036468; As/LbCpf1
gaacgaaatgctttcctgga

SEQ ID NO: 46712 - DNA, 21 bp, Artificial Sequence
  Synthetic: FXN 5 forward 9:69036444-69036469; As/LbCpf1
gaacgaaatgctttcctggaa

SEQ ID NO: 46713 - DNA, 22 bp, Artificial Sequence
  Synthetic: FXN 5 forward 9:69036444-69036470; As/LbCpf1
gaacgaaatgctttcctggaac

SEQ ID NO: 46714 - DNA, 23 bp, Artificial Sequence
  Synthetic: FXN 5 forward 9:69036444-69036471; As/LbCpf1
gaacgaaatgctttcctggaacg

SEQ ID NO: 46715 - DNA, 24 bp, Artificial Sequence
  Synthetic: FXN 5 forward 9:69036444-69036472; As/LbCpf1
gaacgaaatgctttcctggaacga

SEQ ID NO: 46716 - DNA, 25 bp, Artificial Sequence
  Synthetic: FXN 5 forward 9:69036444-69036473; As/LbCpf1
gaacgaaatgctttcctggaacgag

SEQ ID NO: 46717 - DNA, 18 bp, Artificial Sequence
  Synthetic: FXN 5 forward 9:69036445-69036467; As/LbCpf1
aacgaaatgctttcctgg

SEQ ID NO: 46718 - DNA, 19 bp, Artificial Sequence
  Synthetic: FXN 5 forward 9:69036445-69036468; As/LbCpf1
aacgaaatgctttcctgga

SEQ ID NO: 46719 - DNA, 20 bp, Artificial Sequence
  Synthetic: FXN 5 forward 9:69036445-69036469; As/LbCpf1
aacgaaatgctttcctggaa

SEQ ID NO: 46720 - DNA, 21 bp, Artificial Sequence
  Synthetic: FXN 5 forward 9:69036445-69036470; As/LbCpf1
aacgaaatgctttcctggaac

SEQ ID NO: 46721 - DNA, 22 bp, Artificial Sequence
  Synthetic: FXN 5 forward 9:69036445-69036471; As/LbCpf1
aacgaaatgctttcctggaacg

SEQ ID NO: 46722 - DNA, 23 bp, Artificial Sequence
  Synthetic: FXN 5 forward 9:69036445-69036472; As/LbCpf1
aacgaaatgctttcctggaacga

SEQ ID NO: 46723 - DNA, 24 bp, Artificial Sequence
  Synthetic: FXN 5 forward 9:69036445-69036473; As/LbCpf1
aacgaaatgctttcctggaacgag

SEQ ID NO: 46724 - DNA, 25 bp, Artificial Sequence
  Synthetic: FXN 5 forward 9:69036445-69036474; As/LbCpf1
aacgaaatgctttcctggaacgagg

SEQ ID NO: 46725 - DNA, 18 bp, Artificial Sequence
  Synthetic: FXN 5 reverse 9:69036450-69036472; As/LbCpf1
acctcgttccaggaaagc

SEQ ID NO: 46726 - DNA, 19 bp, Artificial Sequence
  Synthetic: FXN 5 reverse 9:69036450-69036473; As/LbCpf1
acctcgttccaggaaagca

SEQ ID NO: 46727 - DNA, 20 bp, Artificial Sequence
  Synthetic: FXN 5 reverse 9:69036450-69036474; As/LbCpf1
acctcgttccaggaaagcat

SEQ ID NO: 46728 - DNA, 21 bp, Artificial Sequence
  Synthetic: FXN 5 reverse 9:69036450-69036475; As/LbCpf1
acctcgttccaggaaagcatt

SEQ ID NO: 46729 - DNA, 22 bp, Artificial Sequence
  Synthetic: FXN 5 reverse 9:69036450-69036476; As/LbCpf1
acctcgttccaggaaagcattt

SEQ ID NO: 46730 - DNA, 23 bp, Artificial Sequence
  Synthetic: FXN 5 reverse 9:69036450-69036477; As/LbCpf1
acctcgttccaggaaagcatttc

SEQ ID NO: 46731 - DNA, 24 bp, Artificial Sequence
  Synthetic: FXN 5 reverse 9:69036450-69036478; As/LbCpf1
acctcgttccaggaaagcatttcg

SEQ ID NO: 46732 - DNA, 25 bp, Artificial Sequence
  Synthetic: FXN 5 reverse 9:69036450-69036479; As/LbCpf1
acctcgttccaggaaagcatttcgt

SEQ ID NO: 46733 - DNA, 18 bp, Artificial Sequence
  Synthetic: FXN 5 forward 9:69036459-69036481; As/LbCpf1
ctggaacgaggtgaaact

SEQ ID NO: 46734 - DNA, 19 bp, Artificial Sequence
  Synthetic: FXN 5 forward 9:69036459-69036482; As/LbCpf1
ctggaacgaggtgaaactt

SEQ ID NO: 46735 - DNA, 20 bp, Artificial Sequence
  Synthetic: FXN 5 forward 9:69036459-69036483; As/LbCpf1
ctggaacgaggtgaaacttt

SEQ ID NO: 46736 - DNA, 21 bp, Artificial Sequence
  Synthetic: FXN 5 forward 9:69036459-69036484; As/LbCpf1
ctggaacgaggtgaaactttc

SEQ ID NO: 46737 - DNA, 22 bp, Artificial Sequence
  Synthetic: FXN 5 forward 9:69036459-69036485; As/LbCpf1
ctggaacgaggtgaaactttca

SEQ ID NO: 46738 - DNA, 23 bp, Artificial Sequence
  Synthetic: FXN 5 forward 9:69036459-69036486; As/LbCpf1
ctggaacgaggtgaaactttcag

SEQ ID NO: 46739 - DNA, 24 bp, Artificial Sequence
  Synthetic: FXN 5 forward 9:69036459-69036487; As/LbCpf1
ctggaacgaggtgaaactttcaga

SEQ ID NO: 46740 - DNA, 25 bp, Artificial Sequence
  Synthetic: FXN 5 forward 9:69036459-69036488; As/LbCpf1
ctggaacgaggtgaaactttcagag

SEQ ID NO: 46741 - DNA, 18 bp, Artificial Sequence
  Synthetic: FXN 5 forward 9:69036480-69036502; As/LbCpf1
agagctgcagaatagcta

SEQ ID NO: 46742 - DNA, 19 bp, Artificial Sequence
  Synthetic: FXN 5 forward 9:69036480-69036503; As/LbCpf1
agagctgcagaatagctag

SEQ ID NO: 46743 - DNA, 20 bp, Artificial Sequence
  Synthetic: FXN 5 forward 9:69036480-69036504; As/LbCpf1
agagctgcagaatagctaga

SEQ ID NO: 46744 - DNA, 21 bp, Artificial Sequence
  Synthetic: FXN 5 forward 9:69036480-69036505; As/LbCpf1
agagctgcagaatagctagag

SEQ ID NO: 46745 - DNA, 22 bp, Artificial Sequence
  Synthetic: FXN 5 forward 9:69036480-69036506; As/LbCpf1
agagctgcagaatagctagagc

SEQ ID NO: 46746 - DNA, 23 bp, Artificial Sequence
  Synthetic: FXN 5 forward 9:69036480-69036507; As/LbCpf1
agagctgcagaatagctagagca

SEQ ID NO: 46747 - DNA, 24 bp, Artificial Sequence
  Synthetic: FXN 5 forward 9:69036480-69036508; As/LbCpf1
agagctgcagaatagctagagcag

SEQ ID NO: 46748 - DNA, 25 bp, Artificial Sequence
  Synthetic: FXN 5 forward 9:69036480-69036509; As/LbCpf1
agagctgcagaatagctagagcagc

SEQ ID NO: 46749 - DNA, 18 bp, Artificial Sequence
  Synthetic: FXN 5 reverse 9:69036501-69036523; As/LbCpf1
caaaagccagggcccctg

SEQ ID NO: 46750 - DNA, 19 bp, Artificial Sequence
  Synthetic: FXN 5 reverse 9:69036501-69036524; As/LbCpf1
caaaagccagggcccctgc

SEQ ID NO: 46751 - DNA, 20 bp, Artificial Sequence
  Synthetic: FXN 5 reverse 9:69036501-69036525; As/LbCpf1
caaaagccagggcccctgct

SEQ ID NO: 46752 - DNA, 21 bp, Artificial Sequence
  Synthetic: FXN 5 reverse 9:69036501-69036526; As/LbCpf1
caaaagccagggcccctgctg

SEQ ID NO: 46753 - DNA, 22 bp, Artificial Sequence
  Synthetic: FXN 5 reverse 9:69036501-69036527; As/LbCpf1
caaaagccagggcccctgctgc

SEQ ID NO: 46754 - DNA, 23 bp, Artificial Sequence
  Synthetic: FXN 5 reverse 9:69036501-69036528; As/LbCpf1
caaaagccagggcccctgctgct

SEQ ID NO: 46755 - DNA, 24 bp, Artificial Sequence
  Synthetic: FXN 5 reverse 9:69036501-69036529; As/LbCpf1
caaaagccagggcccctgctgctc

SEQ ID NO: 46756 - DNA, 25 bp, Artificial Sequence
  Synthetic: FXN 5 reverse 9:69036501-69036530; As/LbCpf1
caaaagccagggcccctgctgctct

SEQ ID NO: 46757 - DNA, 18 bp, Artificial Sequence
  Synthetic: FXN 5 forward 9:69036521-69036543; As/LbCpf1
ggaaactgacccgacctt

SEQ ID NO: 46758 - DNA, 19 bp, Artificial Sequence
  Synthetic: FXN 5 forward 9:69036521-69036544; As/LbCpf1
ggaaactgacccgaccttt

SEQ ID NO: 46759 - DNA, 20 bp, Artificial Sequence
  Synthetic: FXN 5 forward 9:69036521-69036545; As/LbCpf1
ggaaactgacccgaccttta

SEQ ID NO: 46760 - DNA, 21 bp, Artificial Sequence
  Synthetic: FXN 5 forward 9:69036521-69036546; As/LbCpf1
ggaaactgacccgacctttat

SEQ ID NO: 46761 - DNA, 22 bp, Artificial Sequence
  Synthetic: FXN 5 forward 9:69036521-69036547; As/LbCpf1
ggaaactgacccgacctttatt

SEQ ID NO: 46762 - DNA, 23 bp, Artificial Sequence
  Synthetic: FXN 5 forward 9:69036521-69036548; As/LbCpf1
ggaaactgacccgacctttattc

SEQ ID NO: 46763 - DNA, 24 bp, Artificial Sequence
  Synthetic: FXN 5 forward 9:69036521-69036549; As/LbCpf1
ggaaactgacccgacctttattcc

SEQ ID NO: 46764 - DNA, 25 bp, Artificial Sequence
  Synthetic: FXN 5 forward 9:69036521-69036550; As/LbCpf1
ggaaactgacccgacctttattcca

SEQ ID NO: 46765 - DNA, 18 bp, Artificial Sequence
  Synthetic: FXN 5 forward 9:69036522-69036544; As/LbCpf1
gaaactgacccgaccttt

SEQ ID NO: 46766 - DNA, 19 bp, Artificial Sequence
  Synthetic: FXN 5 forward 9:69036522-69036545; As/LbCpf1
gaaactgacccgaccttta

SEQ ID NO: 46767 - DNA, 20 bp, Artificial Sequence
  Synthetic: FXN 5 forward 9:69036522-69036546; As/LbCpf1
gaaactgacccgacctttat

SEQ ID NO: 46768 - DNA, 21 bp, Artificial Sequence
  Synthetic: FXN 5 forward 9:69036522-69036547; As/LbCpf1
gaaactgacccgacctttatt

SEQ ID NO: 46769 - DNA, 22 bp, Artificial Sequence
  Synthetic: FXN 5 forward 9:69036522-69036548; As/LbCpf1
gaaactgacccgacctttattc

SEQ ID NO: 46770 - DNA, 23 bp, Artificial Sequence
  Synthetic: FXN 5 forward 9:69036522-69036549; As/LbCpf1
gaaactgacccgacctttattcc

SEQ ID NO: 46771 - DNA, 24 bp, Artificial Sequence
  Synthetic: FXN 5 forward 9:69036522-69036550; As/LbCpf1
gaaactgacccgacctttattcca

SEQ ID NO: 46772 - DNA, 25 bp, Artificial Sequence
  Synthetic: FXN 5 forward 9:69036522-69036551; As/LbCpf1
gaaactgacccgacctttattccag

SEQ ID NO: 46773 - DNA, 18 bp, Artificial Sequence
  Synthetic: FXN 5 forward 9:69036541-69036563; As/LbCpf1
ttccagattctgccccac

SEQ ID NO: 46774 - DNA, 19 bp, Artificial Sequence
  Synthetic: FXN 5 forward 9:69036541-69036564; As/LbCpf1
ttccagattctgccccact

SEQ ID NO: 46775 - DNA, 20 bp, Artificial Sequence
  Synthetic: FXN 5 forward 9:69036541-69036565; As/LbCpf1
ttccagattctgccccactc

SEQ ID NO: 46776 - DNA, 21 bp, Artificial Sequence
  Synthetic: FXN 5 forward 9:69036541-69036566; As/LbCpf1
ttccagattctgccccactcc

SEQ ID NO: 46777 - DNA, 22 bp, Artificial Sequence
  Synthetic: FXN 5 forward 9:69036541-69036567; As/LbCpf1
ttccagattctgccccactccg

SEQ ID NO: 46778 - DNA, 23 bp, Artificial Sequence
  Synthetic: FXN 5 forward 9:69036541-69036568; As/LbCpf1
ttccagattctgccccactccgc

SEQ ID NO: 46779 - DNA, 24 bp, Artificial Sequence
  Synthetic: FXN 5 forward 9:69036541-69036569; As/LbCpf1
ttccagattctgccccactccgca

SEQ ID NO: 46780 - DNA, 25 bp, Artificial Sequence
  Synthetic: FXN 5 forward 9:69036541-69036570; As/LbCpf1
ttccagattctgccccactccgcag

SEQ ID NO: 46781 - DNA, 18 bp, Artificial Sequence
  Synthetic: FXN 5 reverse 9:69036613-69036635; As/LbCpf1
tcttctccctacagaaaa

SEQ ID NO: 46782 - DNA, 19 bp, Artificial Sequence
  Synthetic: FXN 5 reverse 9:69036613-69036636; As/LbCpf1
tcttctccctacagaaaac

SEQ ID NO: 46783 - DNA, 20 bp, Artificial Sequence
  Synthetic: FXN 5 reverse 9:69036613-69036637; As/LbCpf1
tcttctccctacagaaaaca

SEQ ID NO: 46784 - DNA, 21 bp, Artificial Sequence
  Synthetic: FXN 5 reverse 9:69036613-69036638; As/LbCpf1
tcttctccctacagaaaacaa

SEQ ID NO: 46785 - DNA, 22 bp, Artificial Sequence
  Synthetic: FXN 5 reverse 9:69036613-69036639; As/LbCpf1
tcttctccctacagaaaacaaa

SEQ ID NO: 46786 - DNA, 23 bp, Artificial Sequence
  Synthetic: FXN 5 reverse 9:69036613-69036640; As/LbCpf1
tcttctccctacagaaaacaaag

SEQ ID NO: 46787 - DNA, 24 bp, Artificial Sequence
  Synthetic: FXN 5 reverse 9:69036613-69036641; As/LbCpf1
tcttctccctacagaaaacaaagc

SEQ ID NO: 46788 - DNA, 25 bp, Artificial Sequence
  Synthetic: FXN 5 reverse 9:69036613-69036642; As/LbCpf1
tcttctccctacagaaaacaaagcc

SEQ ID NO: 46789 - DNA, 18 bp, Artificial Sequence
  Synthetic: FXN 5 forward 9:69036616-69036638; As/LbCpf1
ttttctgtagggagaaga

SEQ ID NO: 46790 - DNA, 19 bp, Artificial Sequence
  Synthetic: FXN 5 forward 9:69036616-69036639; As/LbCpf1
ttttctgtagggagaagat

SEQ ID NO: 46791 - DNA, 20 bp, Artificial Sequence
  Synthetic: FXN 5 forward 9:69036616-69036640; As/LbCpf1
ttttctgtagggagaagata

SEQ ID NO: 46792 - DNA, 21 bp, Artificial Sequence
  Synthetic: FXN 5 forward 9:69036616-69036641; As/LbCpf1
ttttctgtagggagaagataa

SEQ ID NO: 46793 - DNA, 22 bp, Artificial Sequence
  Synthetic: FXN 5 forward 9:69036616-69036642; As/LbCpf1
ttttctgtagggagaagataaa

SEQ ID NO: 46794 - DNA, 23 bp, Artificial Sequence
  Synthetic: FXN 5 forward 9:69036616-69036643; As/LbCpf1
ttttctgtagggagaagataaag

SEQ ID NO: 46795 - DNA, 24 bp, Artificial Sequence
  Synthetic: FXN 5 forward 9:69036616-69036644; As/LbCpf1
ttttctgtagggagaagataaagg

SEQ ID NO: 46796 - DNA, 25 bp, Artificial Sequence
  Synthetic: FXN 5 forward 9:69036616-69036645; As/LbCpf1
ttttctgtagggagaagataaaggt

SEQ ID NO: 46797 - DNA, 18 bp, Artificial Sequence
  Synthetic: FXN 5 forward 9:69036620-69036642; As/LbCpf1
ctgtagggagaagataaa

SEQ ID NO: 46798 - DNA, 19 bp, Artificial Sequence
  Synthetic: FXN 5 forward 9:69036620-69036643; As/LbCpf1
ctgtagggagaagataaag

SEQ ID NO: 46799 - DNA, 20 bp, Artificial Sequence
  Synthetic: FXN 5 forward 9:69036620-69036644; As/LbCpf1
ctgtagggagaagataaagg

SEQ ID NO: 46800 - DNA, 21 bp, Artificial Sequence
  Synthetic: FXN 5 forward 9:69036620-69036645; As/LbCpf1
ctgtagggagaagataaaggt

SEQ ID NO: 46801 - DNA, 22 bp, Artificial Sequence
  Synthetic: FXN 5 forward 9:69036620-69036646; As/LbCpf1
ctgtagggagaagataaaggtg

SEQ ID NO: 46802 - DNA, 23 bp, Artificial Sequence
  Synthetic: FXN 5 forward 9:69036620-69036647; As/LbCpf1
ctgtagggagaagataaaggtga

SEQ ID NO: 46803 - DNA, 24 bp, Artificial Sequence
  Synthetic: FXN 5 forward 9:69036620-69036648; As/LbCpf1
ctgtagggagaagataaaggtgac

SEQ ID NO: 46804 - DNA, 25 bp, Artificial Sequence
  Synthetic: FXN 5 forward 9:69036620-69036649; As/LbCpf1
ctgtagggagaagataaaggtgacg

SEQ ID NO: 46805 - DNA, 18 bp, Artificial Sequence
  Synthetic: FXN 5 forward 9:69036621-69036643; As/LbCpf1
tgtagggagaagataaag

SEQ ID NO: 46806 - DNA, 19 bp, Artificial Sequence
  Synthetic: FXN 5 forward 9:69036621-69036644; As/LbCpf1
tgtagggagaagataaagg

SEQ ID NO: 46807 - DNA, 20 bp, Artificial Sequence
  Synthetic: FXN 5 forward 9:69036621-69036645; As/LbCpf1
tgtagggagaagataaaggt

SEQ ID NO: 46808 - DNA, 21 bp, Artificial Sequence
  Synthetic: FXN 5 forward 9:69036621-69036646; As/LbCpf1
tgtagggagaagataaaggtg

SEQ ID NO: 46809 - DNA, 22 bp, Artificial Sequence
  Synthetic: FXN 5 forward 9:69036621-69036647; As/LbCpf1
tgtagggagaagataaaggtga

SEQ ID NO: 46810 - DNA, 23 bp, Artificial Sequence
  Synthetic: FXN 5 forward 9:69036621-69036648; As/LbCpf1
tgtagggagaagataaaggtgac

SEQ ID NO: 46811 - DNA, 24 bp, Artificial Sequence
  Synthetic: FXN 5 forward 9:69036621-69036649; As/LbCpf1
tgtagggagaagataaaggtgacg

SEQ ID NO: 46812 - DNA, 25 bp, Artificial Sequence
  Synthetic: FXN 5 forward 9:69036621-69036650; As/LbCpf1
tgtagggagaagataaaggtgacgc

SEQ ID NO: 46813 - DNA, 18 bp, Artificial Sequence
  Synthetic: FXN 5 reverse 9:69036651-69036673; As/LbCpf1
atcctcacaccaggtccg

SEQ ID NO: 46814 - DNA, 19 bp, Artificial Sequence
  Synthetic: FXN 5 reverse 9:69036651-69036674; As/LbCpf1
atcctcacaccaggtccgc

SEQ ID NO: 46815 - DNA, 20 bp, Artificial Sequence
  Synthetic: FXN 5 reverse 9:69036651-69036675; As/LbCpf1
atcctcacaccaggtccgca

SEQ ID NO: 46816 - DNA, 21 bp, Artificial Sequence
  Synthetic: FXN 5 reverse 9:69036651-69036676; As/LbCpf1
atcctcacaccaggtccgcaa

SEQ ID NO: 46817 - DNA, 22 bp, Artificial Sequence
  Synthetic: FXN 5 reverse 9:69036651-69036677; As/LbCpf1
atcctcacaccaggtccgcaaa

SEQ ID NO: 46818 - DNA, 23 bp, Artificial Sequence
  Synthetic: FXN 5 reverse 9:69036651-69036678; As/LbCpf1
atcctcacaccaggtccgcaaaa

SEQ ID NO: 46819 - DNA, 24 bp, Artificial Sequence
  Synthetic: FXN 5 reverse 9:69036651-69036679; As/LbCpf1
atcctcacaccaggtccgcaaaat

SEQ ID NO: 46820 - DNA, 25 bp, Artificial Sequence
  Synthetic: FXN 5 reverse 9:69036651-69036680; As/LbCpf1
atcctcacaccaggtccgcaaaatg

SEQ ID NO: 46821 - DNA, 18 bp, Artificial Sequence
  Synthetic: FXN 5 forward 9:69036653-69036675; As/LbCpf1
gcggacctggtgtgagga

SEQ ID NO: 46822 - DNA, 19 bp, Artificial Sequence
  Synthetic: FXN 5 forward 9:69036653-69036676; As/LbCpf1
gcggacctggtgtgaggat

SEQ ID NO: 46823 - DNA, 20 bp, Artificial Sequence
  Synthetic: FXN 5 forward 9:69036653-69036677; As/LbCpf1
gcggacctggtgtgaggatt

SEQ ID NO: 46824 - DNA, 21 bp, Artificial Sequence
  Synthetic: FXN 5 forward 9:69036653-69036678; As/LbCpf1
gcggacctggtgtgaggatta

SEQ ID NO: 46825 - DNA, 22 bp, Artificial Sequence
  Synthetic: FXN 5 forward 9:69036653-69036679; As/LbCpf1
gcggacctggtgtgaggattaa

SEQ ID NO: 46826 - DNA, 23 bp, Artificial Sequence
  Synthetic: FXN 5 forward 9:69036653-69036680; As/LbCpf1
gcggacctggtgtgaggattaaa

SEQ ID NO: 46827 - DNA, 24 bp, Artificial Sequence
  Synthetic: FXN 5 forward 9:69036653-69036681; As/LbCpf1
gcggacctggtgtgaggattaaat

SEQ ID NO: 46828 - DNA, 25 bp, Artificial Sequence
  Synthetic: FXN 5 forward 9:69036653-69036682; As/LbCpf1
gcggacctggtgtgaggattaaatg

SEQ ID NO: 46829 - DNA, 18 bp, Artificial Sequence
  Synthetic: FXN 5 forward 9:69036654-69036676; As/LbCpf1
cggacctggtgtgaggat

SEQ ID NO: 46830 - DNA, 19 bp, Artificial Sequence
  Synthetic: FXN 5 forward 9:69036654-69036677; As/LbCpf1
cggacctggtgtgaggatt

SEQ ID NO: 46831 - DNA, 20 bp, Artificial Sequence
  Synthetic: FXN 5 forward 9:69036654-69036678; As/LbCpf1
cggacctggtgtgaggatta

SEQ ID NO: 46832 - DNA, 21 bp, Artificial Sequence
  Synthetic: FXN 5 forward 9:69036654-69036679; As/LbCpf1
cggacctggtgtgaggattaa

SEQ ID NO: 46833 - DNA, 22 bp, Artificial Sequence
  Synthetic: FXN 5 forward 9:69036654-69036680; As/LbCpf1
cggacctggtgtgaggattaaa

SEQ ID NO: 46834 - DNA, 23 bp, Artificial Sequence
  Synthetic: FXN 5 forward 9:69036654-69036681; As/LbCpf1
cggacctggtgtgaggattaaat

SEQ ID NO: 46835 - DNA, 24 bp, Artificial Sequence
  Synthetic: FXN 5 forward 9:69036654-69036682; As/LbCpf1
cggacctggtgtgaggattaaatg

SEQ ID NO: 46836 - DNA, 25 bp, Artificial Sequence
  Synthetic: FXN 5 forward 9:69036654-69036683; As/LbCpf1
cggacctggtgtgaggattaaatgg

SEQ ID NO: 46837 - DNA, 18 bp, Artificial Sequence
  Synthetic: FXN 5 reverse 9:69036670-69036692; As/LbCpf1
tctatgttattcccattt

SEQ ID NO: 46838 - DNA, 19 bp, Artificial Sequence
  Synthetic: FXN 5 reverse 9:69036670-69036693; As/LbCpf1
tctatgttattcccattta

SEQ ID NO: 46839 - DNA, 20 bp, Artificial Sequence
  Synthetic: FXN 5 reverse 9:69036670-69036694; As/LbCpf1
tctatgttattcccatttaa

SEQ ID NO: 46840 - DNA, 21 bp, Artificial Sequence
  Synthetic: FXN 5 reverse 9:69036670-69036695; As/LbCpf1
tctatgttattcccatttaat

SEQ ID NO: 46841 - DNA, 22 bp, Artificial Sequence
  Synthetic: FXN 5 reverse 9:69036670-69036696; As/LbCpf1
tctatgttattcccatttaatc

SEQ ID NO: 46842 - DNA, 23 bp, Artificial Sequence
  Synthetic: FXN 5 reverse 9:69036670-69036697; As/LbCpf1
tctatgttattcccatttaatcc

SEQ ID NO: 46843 - DNA, 24 bp, Artificial Sequence
  Synthetic: FXN 5 reverse 9:69036670-69036698; As/LbCpf1
tctatgttattcccatttaatcct

SEQ ID NO: 46844 - DNA, 25 bp, Artificial Sequence
  Synthetic: FXN 5 reverse 9:69036670-69036699; As/LbCpf1
tctatgttattcccatttaatcctc

SEQ ID NO: 46845 - DNA, 18 bp, Artificial Sequence
  Synthetic: FXN 5 reverse 9:69036687-69036709; As/LbCpf1
aagttctgaagactttat

SEQ ID NO: 46846 - DNA, 19 bp, Artificial Sequence
  Synthetic: FXN 5 reverse 9:69036687-69036710; As/LbCpf1
aagttctgaagactttatc

SEQ ID NO: 46847 - DNA, 20 bp, Artificial Sequence
  Synthetic: FXN 5 reverse 9:69036687-69036711; As/LbCpf1
aagttctgaagactttatct

SEQ ID NO: 46848 - DNA, 21 bp, Artificial Sequence
  Synthetic: FXN 5 reverse 9:69036687-69036712; As/LbCpf1
aagttctgaagactttatcta

SEQ ID NO: 46849 - DNA, 22 bp, Artificial Sequence
  Synthetic: FXN 5 reverse 9:69036687-69036713; As/LbCpf1
aagttctgaagactttatctat

SEQ ID NO: 46850 - DNA, 23 bp, Artificial Sequence
  Synthetic: FXN 5 reverse 9:69036687-69036714; As/LbCpf1
aagttctgaagactttatctatg

SEQ ID NO: 46851 - DNA, 24 bp, Artificial Sequence
  Synthetic: FXN 5 reverse 9:69036687-69036715; As/LbCpf1
aagttctgaagactttatctatgt

SEQ ID NO: 46852 - DNA, 25 bp, Artificial Sequence
  Synthetic: FXN 5 reverse 9:69036687-69036716; As/LbCpf1
aagttctgaagactttatctatgtt

SEQ ID NO: 46853 - DNA, 18 bp, Artificial Sequence
  Synthetic: FXN 5 reverse 9:69036720-69036742; As/LbCpf1
taccccccaaaggaagaa

SEQ ID NO: 46854 - DNA, 19 bp, Artificial Sequence
  Synthetic: FXN 5 reverse 9:69036720-69036743; As/LbCpf1
taccccccaaaggaagaaa

SEQ ID NO: 46855 - DNA, 20 bp, Artificial Sequence
  Synthetic: FXN 5 reverse 9:69036720-69036744; As/LbCpf1
taccccccaaaggaagaaag

SEQ ID NO: 46856 - DNA, 21 bp, Artificial Sequence
  Synthetic: FXN 5 reverse 9:69036720-69036745; As/LbCpf1
taccccccaaaggaagaaagg

SEQ ID NO: 46857 - DNA, 22 bp, Artificial Sequence
  Synthetic: FXN 5 reverse 9:69036720-69036746; As/LbCpf1
taccccccaaaggaagaaaggg

SEQ ID NO: 46858 - DNA, 23 bp, Artificial Sequence
  Synthetic: FXN 5 reverse 9:69036720-69036747; As/LbCpf1
taccccccaaaggaagaaagggg

SEQ ID NO: 46859 - DNA, 24 bp, Artificial Sequence
  Synthetic: FXN 5 reverse 9:69036720-69036748; As/LbCpf1
taccccccaaaggaagaaagggga

SEQ ID NO: 46860 - DNA, 25 bp, Artificial Sequence
  Synthetic: FXN 5 reverse 9:69036720-69036749; As/LbCpf1
taccccccaaaggaagaaaggggaa

SEQ ID NO: 46861 - DNA, 18 bp, Artificial Sequence
  Synthetic: FXN 5 reverse 9:69036724-69036746; As/LbCpf1
tttgtaccccccaaagga

SEQ ID NO: 46862 - DNA, 19 bp, Artificial Sequence
  Synthetic: FXN 5 reverse 9:69036724-69036747; As/LbCpf1
tttgtaccccccaaaggaa

SEQ ID NO: 46863 - DNA, 20 bp, Artificial Sequence
  Synthetic: FXN 5 reverse 9:69036724-69036748; As/LbCpf1
tttgtaccccccaaaggaag

SEQ ID NO: 46864 - DNA, 21 bp, Artificial Sequence
  Synthetic: FXN 5 reverse 9:69036724-69036749; As/LbCpf1
tttgtaccccccaaaggaaga

SEQ ID NO: 46865 - DNA, 22 bp, Artificial Sequence
  Synthetic: FXN 5 reverse 9:69036724-69036750; As/LbCpf1
tttgtaccccccaaaggaagaa

SEQ ID NO: 46866 - DNA, 23 bp, Artificial Sequence
  Synthetic: FXN 5 reverse 9:69036724-69036751; As/LbCpf1
tttgtaccccccaaaggaagaaa

SEQ ID NO: 46867 - DNA, 24 bp, Artificial Sequence
  Synthetic: FXN 5 reverse 9:69036724-69036752; As/LbCpf1
tttgtaccccccaaaggaagaaag

SEQ ID NO: 46868 - DNA, 25 bp, Artificial Sequence
  Synthetic: FXN 5 reverse 9:69036724-69036753; As/LbCpf1
tttgtaccccccaaaggaagaaagg

SEQ ID NO: 46869 - DNA, 18 bp, Artificial Sequence
  Synthetic: FXN 5 forward 9:69036726-69036748; As/LbCpf1
ttcctttggggggtacaa

SEQ ID NO: 46870 - DNA, 19 bp, Artificial Sequence
  Synthetic: FXN 5 forward 9:69036726-69036749; As/LbCpf1
ttcctttggggggtacaaa

SEQ ID NO: 46871 - DNA, 20 bp, Artificial Sequence
  Synthetic: FXN 5 forward 9:69036726-69036750; As/LbCpf1
ttcctttggggggtacaaag

SEQ ID NO: 46872 - DNA, 21 bp, Artificial Sequence
  Synthetic: FXN 5 forward 9:69036726-69036751; As/LbCpf1
ttcctttggggggtacaaaga

SEQ ID NO: 46873 - DNA, 22 bp, Artificial Sequence
  Synthetic: FXN 5 forward 9:69036726-69036752; As/LbCpf1
ttcctttggggggtacaaagaa

SEQ ID NO: 46874 - DNA, 23 bp, Artificial Sequence
  Synthetic: FXN 5 forward 9:69036726-69036753; As/LbCpf1
ttcctttggggggtacaaagaaa

SEQ ID NO: 46875 - DNA, 24 bp, Artificial Sequence
  Synthetic: FXN 5 forward 9:69036726-69036754; As/LbCpf1
ttcctttggggggtacaaagaaat

SEQ ID NO: 46876 - DNA, 25 bp, Artificial Sequence
  Synthetic: FXN 5 forward 9:69036726-69036755; As/LbCpf1
ttcctttggggggtacaaagaaata

SEQ ID NO: 46877 - DNA, 18 bp, Artificial Sequence
  Synthetic: FXN 5 forward 9:69036734-69036756; As/LbCpf1
gggggtacaaagaaatat

SEQ ID NO: 46878 - DNA, 19 bp, Artificial Sequence
  Synthetic: FXN 5 forward 9:69036734-69036757; As/LbCpf1
gggggtacaaagaaatatc

SEQ ID NO: 46879 - DNA, 20 bp, Artificial Sequence
  Synthetic: FXN 5 forward 9:69036734-69036758; As/LbCpf1
gggggtacaaagaaatatct

SEQ ID NO: 46880 - DNA, 21 bp, Artificial Sequence
  Synthetic: FXN 5 forward 9:69036734-69036759; As/LbCpf1
gggggtacaaagaaatatctg

SEQ ID NO: 46881 - DNA, 22 bp, Artificial Sequence
  Synthetic: FXN 5 forward 9:69036734-69036760; As/LbCpf1
gggggtacaaagaaatatctga

SEQ ID NO: 46882 - DNA, 23 bp, Artificial Sequence
  Synthetic: FXN 5 forward 9:69036734-69036761; As/LbCpf1
gggggtacaaagaaatatctgac

SEQ ID NO: 46883 - DNA, 24 bp, Artificial Sequence
  Synthetic: FXN 5 forward 9:69036734-69036762; As/LbCpf1
gggggtacaaagaaatatctgacc

SEQ ID NO: 46884 - DNA, 25 bp, Artificial Sequence
  Synthetic: FXN 5 forward 9:69036734-69036763; As/LbCpf1
gggggtacaaagaaatatctgaccc

SEQ ID NO: 46885 - DNA, 18 bp, Artificial Sequence
  Synthetic: FXN 5 reverse 9:69036754-69036776; As/LbCpf1
aagccgtggcgtaactgg

SEQ ID NO: 46886 - DNA, 19 bp, Artificial Sequence
  Synthetic: FXN 5 reverse 9:69036754-69036777; As/LbCpf1
aagccgtggcgtaactggg

SEQ ID NO: 46887 - DNA, 20 bp, Artificial Sequence
  Synthetic: FXN 5 reverse 9:69036754-69036778; As/LbCpf1
aagccgtggcgtaactgggt

SEQ ID NO: 46888 - DNA, 21 bp, Artificial Sequence
  Synthetic: FXN 5 reverse 9:69036754-69036779; As/LbCpf1
aagccgtggcgtaactgggtc

SEQ ID NO: 46889 - DNA, 22 bp, Artificial Sequence
  Synthetic: FXN 5 reverse 9:69036754-69036780; As/LbCpf1
aagccgtggcgtaactgggtca

SEQ ID NO: 46890 - DNA, 23 bp, Artificial Sequence
  Synthetic: FXN 5 reverse 9:69036754-69036781; As/LbCpf1
aagccgtggcgtaactgggtcag

SEQ ID NO: 46891 - DNA, 24 bp, Artificial Sequence
  Synthetic: FXN 5 reverse 9:69036754-69036782; As/LbCpf1
aagccgtggcgtaactgggtcaga

SEQ ID NO: 46892 - DNA, 25 bp, Artificial Sequence
  Synthetic: FXN 5 reverse 9:69036754-69036783; As/LbCpf1
aagccgtggcgtaactgggtcagat

SEQ ID NO: 46893 - DNA, 18 bp, Artificial Sequence
  Synthetic: FXN 5 reverse 9:69036762-69036784; As/LbCpf1
ctcctttcaagccgtggc

SEQ ID NO: 46894 - DNA, 19 bp, Artificial Sequence
  Synthetic: FXN 5 reverse 9:69036762-69036785; As/LbCpf1
ctcctttcaagccgtggcg

SEQ ID NO: 46895 - DNA, 20 bp, Artificial Sequence
  Synthetic: FXN 5 reverse 9:69036762-69036786; As/LbCpf1
ctcctttcaagccgtggcgt

SEQ ID NO: 46896 - DNA, 21 bp, Artificial Sequence
  Synthetic: FXN 5 reverse 9:69036762-69036787; As/LbCpf1
ctcctttcaagccgtggcgta

SEQ ID NO: 46897 - DNA, 22 bp, Artificial Sequence
  Synthetic: FXN 5 reverse 9:69036762-69036788; As/LbCpf1
ctcctttcaagccgtggcgtaa

SEQ ID NO: 46898 - DNA, 23 bp, Artificial Sequence
  Synthetic: FXN 5 reverse 9:69036762-69036789; As/LbCpf1
ctcctttcaagccgtggcgtaac

SEQ ID NO: 46899 - DNA, 24 bp, Artificial Sequence
  Synthetic: FXN 5 reverse 9:69036762-69036790; As/LbCpf1
ctcctttcaagccgtggcgtaact

SEQ ID NO: 46900 - DNA, 25 bp, Artificial Sequence
  Synthetic: FXN 5 reverse 9:69036762-69036791; As/LbCpf1
ctcctttcaagccgtggcgtaactg

SEQ ID NO: 46901 - DNA, 18 bp, Artificial Sequence
  Synthetic: FXN 5 reverse 9:69036768-69036790; As/LbCpf1
ggtttcctcctttcaagc

SEQ ID NO: 46902 - DNA, 19 bp, Artificial Sequence
  Synthetic: FXN 5 reverse 9:69036768-69036791; As/LbCpf1
ggtttcctcctttcaagcc

SEQ ID NO: 46903 - DNA, 20 bp, Artificial Sequence
  Synthetic: FXN 5 reverse 9:69036768-69036792; As/LbCpf1
ggtttcctcctttcaagccg

SEQ ID NO: 46904 - DNA, 21 bp, Artificial Sequence
  Synthetic: FXN 5 reverse 9:69036768-69036793; As/LbCpf1
ggtttcctcctttcaagccgt

SEQ ID NO: 46905 - DNA, 22 bp, Artificial Sequence
  Synthetic: FXN 5 reverse 9:69036768-69036794; As/LbCpf1
ggtttcctcctttcaagccgtg

SEQ ID NO: 46906 - DNA, 23 bp, Artificial Sequence
  Synthetic: FXN 5 reverse 9:69036768-69036795; As/LbCpf1
ggtttcctcctttcaagccgtgg

SEQ ID NO: 46907 - DNA, 24 bp, Artificial Sequence
  Synthetic: FXN 5 reverse 9:69036768-69036796; As/LbCpf1
ggtttcctcctttcaagccgtggc

SEQ ID NO: 46908 - DNA, 25 bp, Artificial Sequence
  Synthetic: FXN 5 reverse 9:69036768-69036797; As/LbCpf1
ggtttcctcctttcaagccgtggcg

SEQ ID NO: 46909 - DNA, 18 bp, Artificial Sequence
  Synthetic: FXN 5 forward 9:69036844-69036866; As/LbCpf1
atgagggtcttgaagatg

SEQ ID NO: 46910 - DNA, 19 bp, Artificial Sequence
  Synthetic: FXN 5 forward 9:69036844-69036867; As/LbCpf1
atgagggtcttgaagatgc

SEQ ID NO: 46911 - DNA, 20 bp, Artificial Sequence
  Synthetic: FXN 5 forward 9:69036844-69036868; As/LbCpf1
atgagggtcttgaagatgcc

SEQ ID NO: 46912 - DNA, 21 bp, Artificial Sequence
  Synthetic: FXN 5 forward 9:69036844-69036869; As/LbCpf1
atgagggtcttgaagatgcca

SEQ ID NO: 46913 - DNA, 22 bp, Artificial Sequence
  Synthetic: FXN 5 forward 9:69036844-69036870; As/LbCpf1
atgagggtcttgaagatgccaa

SEQ ID NO: 46914 - DNA, 23 bp, Artificial Sequence
  Synthetic: FXN 5 forward 9:69036844-69036871; As/LbCpf1
atgagggtcttgaagatgccaag

SEQ ID NO: 46915 - DNA, 24 bp, Artificial Sequence
  Synthetic: FXN 5 forward 9:69036844-69036872; As/LbCpf1
atgagggtcttgaagatgccaagg

SEQ ID NO: 46916 - DNA, 25 bp, Artificial Sequence
  Synthetic: FXN 5 forward 9:69036844-69036873; As/LbCpf1
atgagggtcttgaagatgccaagga

SEQ ID NO: 46917 - DNA, 18 bp, Artificial Sequence
  Synthetic: FXN 5 forward 9:69036887-69036909; As/LbCpf1
acgaggagggaaccgtct

SEQ ID NO: 46918 - DNA, 19 bp, Artificial Sequence
  Synthetic: FXN 5 forward 9:69036887-69036910; As/LbCpf1
acgaggagggaaccgtctg

SEQ ID NO: 46919 - DNA, 20 bp, Artificial Sequence
  Synthetic: FXN 5 forward 9:69036887-69036911; As/LbCpf1
acgaggagggaaccgtctgg

SEQ ID NO: 46920 - DNA, 21 bp, Artificial Sequence
  Synthetic: FXN 5 forward 9:69036887-69036912; As/LbCpf1
acgaggagggaaccgtctggg

SEQ ID NO: 46921 - DNA, 22 bp, Artificial Sequence
  Synthetic: FXN 5 forward 9:69036887-69036913; As/LbCpf1
acgaggagggaaccgtctgggc

SEQ ID NO: 46922 - DNA, 23 bp, Artificial Sequence
  Synthetic: FXN 5 forward 9:69036887-69036914; As/LbCpf1
acgaggagggaaccgtctgggca

SEQ ID NO: 46923 - DNA, 24 bp, Artificial Sequence
  Synthetic: FXN 5 forward 9:69036887-69036915; As/LbCpf1
acgaggagggaaccgtctgggcaa

SEQ ID NO: 46924 - DNA, 25 bp, Artificial Sequence
  Synthetic: FXN 5 forward 9:69036887-69036916; As/LbCpf1
acgaggagggaaccgtctgggcaaa

SEQ ID NO: 46925 - DNA, 18 bp, Artificial Sequence
  Synthetic: FXN 5 reverse 9:69036887-69036909; As/LbCpf1
cccagacggttccctcct

SEQ ID NO: 46926 - DNA, 19 bp, Artificial Sequence
  Synthetic: FXN 5 reverse 9:69036887-69036910; As/LbCpf1
cccagacggttccctcctc

SEQ ID NO: 46927 - DNA, 20 bp, Artificial Sequence
  Synthetic: FXN 5 reverse 9:69036887-69036911; As/LbCpf1
cccagacggttccctcctcg

SEQ ID NO: 46928 - DNA, 21 bp, Artificial Sequence
  Synthetic: FXN 5 reverse 9:69036887-69036912; As/LbCpf1
cccagacggttccctcctcgt

SEQ ID NO: 46929 - DNA, 22 bp, Artificial Sequence
  Synthetic: FXN 5 reverse 9:69036887-69036913; As/LbCpf1
cccagacggttccctcctcgtg

SEQ ID NO: 46930 - DNA, 23 bp, Artificial Sequence
  Synthetic: FXN 5 reverse 9:69036887-69036914; As/LbCpf1
cccagacggttccctcctcgtga

SEQ ID NO: 46931 - DNA, 24 bp, Artificial Sequence
  Synthetic: FXN 5 reverse 9:69036887-69036915; As/LbCpf1
cccagacggttccctcctcgtgaa

SEQ ID NO: 46932 - DNA, 25 bp, Artificial Sequence
  Synthetic: FXN 5 reverse 9:69036887-69036916; As/LbCpf1
cccagacggttccctcctcgtgaaa

SEQ ID NO: 46933 - DNA, 18 bp, Artificial Sequence
  Synthetic: FXN 5 reverse 9:69036954-69036976; As/LbCpf1
atctcccctaatacatgc

SEQ ID NO: 46934 - DNA, 19 bp, Artificial Sequence
  Synthetic: FXN 5 reverse 9:69036954-69036977; As/LbCpf1
atctcccctaatacatgcg

SEQ ID NO: 46935 - DNA, 20 bp, Artificial Sequence
  Synthetic: FXN 5 reverse 9:69036954-69036978; As/LbCpf1
atctcccctaatacatgcgg

SEQ ID NO: 46936 - DNA, 21 bp, Artificial Sequence
  Synthetic: FXN 5 reverse 9:69036954-69036979; As/LbCpf1
atctcccctaatacatgcggc

SEQ ID NO: 46937 - DNA, 22 bp, Artificial Sequence
  Synthetic: FXN 5 reverse 9:69036954-69036980; As/LbCpf1
atctcccctaatacatgcggcg

SEQ ID NO: 46938 - DNA, 23 bp, Artificial Sequence
  Synthetic: FXN 5 reverse 9:69036954-69036981; As/LbCpf1
atctcccctaatacatgcggcgt

SEQ ID NO: 46939 - DNA, 24 bp, Artificial Sequence
  Synthetic: FXN 5 reverse 9:69036954-69036982; As/LbCpf1
atctcccctaatacatgcggcgta

SEQ ID NO: 46940 - DNA, 25 bp, Artificial Sequence
  Synthetic: FXN 5 reverse 9:69036954-69036983; As/LbCpf1
atctcccctaatacatgcggcgtac

SEQ ID NO: 46941 - DNA, 18 bp, Artificial Sequence
  Synthetic: FXN 5 forward 9:69037007-69037029; As/LbCpf1
tgttgctctccggagttt

SEQ ID NO: 46942 - DNA, 19 bp, Artificial Sequence
  Synthetic: FXN 5 forward 9:69037007-69037030; As/LbCpf1
tgttgctctccggagtttg

SEQ ID NO: 46943 - DNA, 20 bp, Artificial Sequence
  Synthetic: FXN 5 forward 9:69037007-69037031; As/LbCpf1
tgttgctctccggagtttgt

SEQ ID NO: 46944 - DNA, 21 bp, Artificial Sequence
  Synthetic: FXN 5 forward 9:69037007-69037032; As/LbCpf1
tgttgctctccggagtttgta

SEQ ID NO: 46945 - DNA, 22 bp, Artificial Sequence
  Synthetic: FXN 5 forward 9:69037007-69037033; As/LbCpf1
tgttgctctccggagtttgtac

SEQ ID NO: 46946 - DNA, 23 bp, Artificial Sequence
  Synthetic: FXN 5 forward 9:69037007-69037034; As/LbCpf1
tgttgctctccggagtttgtact

SEQ ID NO: 46947 - DNA, 24 bp, Artificial Sequence
  Synthetic: FXN 5 forward 9:69037007-69037035; As/LbCpf1
tgttgctctccggagtttgtactt

SEQ ID NO: 46948 - DNA, 25 bp, Artificial Sequence
  Synthetic: FXN 5 forward 9:69037007-69037036; As/LbCpf1
tgttgctctccggagtttgtacttt

SEQ ID NO: 46949 - DNA, 18 bp, Artificial Sequence
  Synthetic: FXN 5 forward 9:69037026-69037048; As/LbCpf1
tactttaggcttgaactt

SEQ ID NO: 46950 - DNA, 19 bp, Artificial Sequence
  Synthetic: FXN 5 forward 9:69037026-69037049; As/LbCpf1
tactttaggcttgaacttc

SEQ ID NO: 46951 - DNA, 20 bp, Artificial Sequence
  Synthetic: FXN 5 forward 9:69037026-69037050; As/LbCpf1
tactttaggcttgaacttcc

SEQ ID NO: 46952 - DNA, 21 bp, Artificial Sequence
  Synthetic: FXN 5 forward 9:69037026-69037051; As/LbCpf1
tactttaggcttgaacttccc

SEQ ID NO: 46953 - DNA, 22 bp, Artificial Sequence
  Synthetic: FXN 5 forward 9:69037026-69037052; As/LbCpf1
tactttaggcttgaacttccca

SEQ ID NO: 46954 - DNA, 23 bp, Artificial Sequence
  Synthetic: FXN 5 forward 9:69037026-69037053; As/LbCpf1
tactttaggcttgaacttcccac

SEQ ID NO: 46955 - DNA, 24 bp, Artificial Sequence
  Synthetic: FXN 5 forward 9:69037026-69037054; As/LbCpf1
tactttaggcttgaacttcccaca

SEQ ID NO: 46956 - DNA, 25 bp, Artificial Sequence
  Synthetic: FXN 5 forward 9:69037026-69037055; As/LbCpf1
tactttaggcttgaacttcccacac

SEQ ID NO: 46957 - DNA, 18 bp, Artificial Sequence
  Synthetic: FXN 5 forward 9:69037033-69037055; As/LbCpf1
ggcttgaacttcccacac

SEQ ID NO: 46958 - DNA, 19 bp, Artificial Sequence
  Synthetic: FXN 5 forward 9:69037033-69037056; As/LbCpf1
ggcttgaacttcccacacg

SEQ ID NO: 46959 - DNA, 20 bp, Artificial Sequence
  Synthetic: FXN 5 forward 9:69037033-69037057; As/LbCpf1
ggcttgaacttcccacacgt

SEQ ID NO: 46960 - DNA, 21 bp, Artificial Sequence
  Synthetic: FXN 5 forward 9:69037033-69037058; As/LbCpf1
ggcttgaacttcccacacgtg

SEQ ID NO: 46961 - DNA, 22 bp, Artificial Sequence
  Synthetic: FXN 5 forward 9:69037033-69037059; As/LbCpf1
ggcttgaacttcccacacgtgt

SEQ ID NO: 46962 - DNA, 23 bp, Artificial Sequence
  Synthetic: FXN 5 forward 9:69037033-69037060; As/LbCpf1
ggcttgaacttcccacacgtgtt

SEQ ID NO: 46963 - DNA, 24 bp, Artificial Sequence
  Synthetic: FXN 5 forward 9:69037033-69037061; As/LbCpf1
ggcttgaacttcccacacgtgtta

SEQ ID NO: 46964 - DNA, 25 bp, Artificial Sequence
  Synthetic: FXN 5 forward 9:69037033-69037062; As/LbCpf1
ggcttgaacttcccacacgtgttat

SEQ ID NO: 46965 - DNA, 18 bp, Artificial Sequence
  Synthetic: FXN 5 reverse 9:69037058-69037080; As/LbCpf1
ttcaaacacaatgtgggc

SEQ ID NO: 46966 - DNA, 19 bp, Artificial Sequence
  Synthetic: FXN 5 reverse 9:69037058-69037081; As/LbCpf1
ttcaaacacaatgtgggcc

SEQ ID NO: 46967 - DNA, 20 bp, Artificial Sequence
  Synthetic: FXN 5 reverse 9:69037058-69037082; As/LbCpf1
ttcaaacacaatgtgggcca

SEQ ID NO: 46968 - DNA, 21 bp, Artificial Sequence
  Synthetic: FXN 5 reverse 9:69037058-69037083; As/LbCpf1
ttcaaacacaatgtgggccaa

SEQ ID NO: 46969 - DNA, 22 bp, Artificial Sequence
  Synthetic: FXN 5 reverse 9:69037058-69037084; As/LbCpf1
ttcaaacacaatgtgggccaaa

SEQ ID NO: 46970 - DNA, 23 bp, Artificial Sequence
  Synthetic: FXN 5 reverse 9:69037058-69037085; As/LbCpf1
ttcaaacacaatgtgggccaaat

SEQ ID NO: 46971 - DNA, 24 bp, Artificial Sequence
  Synthetic: FXN 5 reverse 9:69037058-69037086; As/LbCpf1
ttcaaacacaatgtgggccaaata

SEQ ID NO: 46972 - DNA, 25 bp, Artificial Sequence
  Synthetic: FXN 5 reverse 9:69037058-69037087; As/LbCpf1
ttcaaacacaatgtgggccaaataa

SEQ ID NO: 46973 - DNA, 18 bp, Artificial Sequence
  Synthetic: FXN 5 forward 9:69037061-69037083; As/LbCpf1
gcccacattgtgtttgaa

SEQ ID NO: 46974 - DNA, 19 bp, Artificial Sequence
  Synthetic: FXN 5 forward 9:69037061-69037084; As/LbCpf1
gcccacattgtgtttgaag

SEQ ID NO: 46975 - DNA, 20 bp, Artificial Sequence
  Synthetic: FXN 5 forward 9:69037061-69037085; As/LbCpf1
gcccacattgtgtttgaaga

SEQ ID NO: 46976 - DNA, 21 bp, Artificial Sequence
  Synthetic: FXN 5 forward 9:69037061-69037086; As/LbCpf1
gcccacattgtgtttgaagaa

SEQ ID NO: 46977 - DNA, 22 bp, Artificial Sequence
  Synthetic: FXN 5 forward 9:69037061-69037087; As/LbCpf1
gcccacattgtgtttgaagaaa

SEQ ID NO: 46978 - DNA, 23 bp, Artificial Sequence
  Synthetic: FXN 5 forward 9:69037061-69037088; As/LbCpf1
gcccacattgtgtttgaagaaac

SEQ ID NO: 46979 - DNA, 24 bp, Artificial Sequence
  Synthetic: FXN 5 forward 9:69037061-69037089; As/LbCpf1
gcccacattgtgtttgaagaaact

SEQ ID NO: 46980 - DNA, 25 bp, Artificial Sequence
  Synthetic: FXN 5 forward 9:69037061-69037090; As/LbCpf1
gcccacattgtgtttgaagaaactt

SEQ ID NO: 46981 - DNA, 18 bp, Artificial Sequence
  Synthetic: FXN 5 forward 9:69037077-69037099; As/LbCpf1
aagaaactttgggattgg

SEQ ID NO: 46982 - DNA, 19 bp, Artificial Sequence
  Synthetic: FXN 5 forward 9:69037077-69037100; As/LbCpf1
aagaaactttgggattggt

SEQ ID NO: 46983 - DNA, 20 bp, Artificial Sequence
  Synthetic: FXN 5 forward 9:69037077-69037101; As/LbCpf1
aagaaactttgggattggtt

SEQ ID NO: 46984 - DNA, 21 bp, Artificial Sequence
  Synthetic: FXN 5 forward 9:69037077-69037102; As/LbCpf1
aagaaactttgggattggttg

SEQ ID NO: 46985 - DNA, 22 bp, Artificial Sequence
  Synthetic: FXN 5 forward 9:69037077-69037103; As/LbCpf1
aagaaactttgggattggttgc

SEQ ID NO: 46986 - DNA, 23 bp, Artificial Sequence
  Synthetic: FXN 5 forward 9:69037077-69037104; As/LbCpf1
aagaaactttgggattggttgcc

SEQ ID NO: 46987 - DNA, 24 bp, Artificial Sequence
  Synthetic: FXN 5 forward 9:69037077-69037105; As/LbCpf1
aagaaactttgggattggttgcca

SEQ ID NO: 46988 - DNA, 25 bp, Artificial Sequence
  Synthetic: FXN 5 forward 9:69037077-69037106; As/LbCpf1
aagaaactttgggattggttgccag

SEQ ID NO: 46989 - DNA, 18 bp, Artificial Sequence
  Synthetic: FXN 5 reverse 9:69037085-69037107; As/LbCpf1
agcactggcaaccaatcc

SEQ ID NO: 46990 - DNA, 19 bp, Artificial Sequence
  Synthetic: FXN 5 reverse 9:69037085-69037108; As/LbCpf1
agcactggcaaccaatccc

SEQ ID NO: 46991 - DNA, 20 bp, Artificial Sequence
  Synthetic: FXN 5 reverse 9:69037085-69037109; As/LbCpf1
agcactggcaaccaatccca

SEQ ID NO: 46992 - DNA, 21 bp, Artificial Sequence
  Synthetic: FXN 5 reverse 9:69037085-69037110; As/LbCpf1
agcactggcaaccaatcccaa

SEQ ID NO: 46993 - DNA, 22 bp, Artificial Sequence
  Synthetic: FXN 5 reverse 9:69037085-69037111; As/LbCpf1
agcactggcaaccaatcccaaa

SEQ ID NO: 46994 - DNA, 23 bp, Artificial Sequence
  Synthetic: FXN 5 reverse 9:69037085-69037112; As/LbCpf1
agcactggcaaccaatcccaaag

SEQ ID NO: 46995 - DNA, 24 bp, Artificial Sequence
  Synthetic: FXN 5 reverse 9:69037085-69037113; As/LbCpf1
agcactggcaaccaatcccaaagt

SEQ ID NO: 46996 - DNA, 25 bp, Artificial Sequence
  Synthetic: FXN 5 reverse 9:69037085-69037114; As/LbCpf1
agcactggcaaccaatcccaaagtt

SEQ ID NO: 46997 - DNA, 18 bp, Artificial Sequence
  Synthetic: FXN 5 reverse 9:69037086-69037108; As/LbCpf1
aagcactggcaaccaatc

SEQ ID NO: 46998 - DNA, 19 bp, Artificial Sequence
  Synthetic: FXN 5 reverse 9:69037086-69037109; As/LbCpf1
aagcactggcaaccaatcc

SEQ ID NO: 46999 - DNA, 20 bp, Artificial Sequence
  Synthetic: FXN 5 reverse 9:69037086-69037110; As/LbCpf1
aagcactggcaaccaatccc

SEQ ID NO: 47000 - DNA, 21 bp, Artificial Sequence
  Synthetic: FXN 5 reverse 9:69037086-69037111; As/LbCpf1
aagcactggcaaccaatccca

SEQ ID NO: 47001 - DNA, 22 bp, Artificial Sequence
  Synthetic: FXN 5 reverse 9:69037086-69037112; As/LbCpf1
aagcactggcaaccaatcccaa

SEQ ID NO: 47002 - DNA, 23 bp, Artificial Sequence
  Synthetic: FXN 5 reverse 9:69037086-69037113; As/LbCpf1
aagcactggcaaccaatcccaaa

SEQ ID NO: 47003 - DNA, 24 bp, Artificial Sequence
  Synthetic: FXN 5 reverse 9:69037086-69037114; As/LbCpf1
aagcactggcaaccaatcccaaag

SEQ ID NO: 47004 - DNA, 25 bp, Artificial Sequence
  Synthetic: FXN 5 reverse 9:69037086-69037115; As/LbCpf1
aagcactggcaaccaatcccaaagt

SEQ ID NO: 47005 - DNA, 18 bp, Artificial Sequence
  Synthetic: FXN 5 forward 9:69037088-69037110; As/LbCpf1
ggattggttgccagtgct

SEQ ID NO: 47006 - DNA, 19 bp, Artificial Sequence
  Synthetic: FXN 5 forward 9:69037088-69037111; As/LbCpf1
ggattggttgccagtgctt

SEQ ID NO: 47007 - DNA, 20 bp, Artificial Sequence
  Synthetic: FXN 5 forward 9:69037088-69037112; As/LbCpf1
ggattggttgccagtgctta

SEQ ID NO: 47008 - DNA, 21 bp, Artificial Sequence
  Synthetic: FXN 5 forward 9:69037088-69037113; As/LbCpf1
ggattggttgccagtgcttaa

SEQ ID NO: 47009 - DNA, 22 bp, Artificial Sequence
  Synthetic: FXN 5 forward 9:69037088-69037114; As/LbCpf1
ggattggttgccagtgcttaaa

SEQ ID NO: 47010 - DNA, 23 bp, Artificial Sequence
  Synthetic: FXN 5 forward 9:69037088-69037115; As/LbCpf1
ggattggttgccagtgcttaaaa

SEQ ID NO: 47011 - DNA, 24 bp, Artificial Sequence
  Synthetic: FXN 5 forward 9:69037088-69037116; As/LbCpf1
ggattggttgccagtgcttaaaag

SEQ ID NO: 47012 - DNA, 25 bp, Artificial Sequence
  Synthetic: FXN 5 forward 9:69037088-69037117; As/LbCpf1
ggattggttgccagtgcttaaaagt

SEQ ID NO: 47013 - DNA, 18 bp, Artificial Sequence
  Synthetic: FXN 5 reverse 9:69037101-69037123; As/LbCpf1
taagtcctaacttttaag

SEQ ID NO: 47014 - DNA, 19 bp, Artificial Sequence
  Synthetic: FXN 5 reverse 9:69037101-69037124; As/LbCpf1
taagtcctaacttttaagc

SEQ ID NO: 47015 - DNA, 20 bp, Artificial Sequence
  Synthetic: FXN 5 reverse 9:69037101-69037125; As/LbCpf1
taagtcctaacttttaagca

SEQ ID NO: 47016 - DNA, 21 bp, Artificial Sequence
  Synthetic: FXN 5 reverse 9:69037101-69037126; As/LbCpf1
taagtcctaacttttaagcac

SEQ ID NO: 47017 - DNA, 22 bp, Artificial Sequence
  Synthetic: FXN 5 reverse 9:69037101-69037127; As/LbCpf1
taagtcctaacttttaagcact

SEQ ID NO: 47018 - DNA, 23 bp, Artificial Sequence
  Synthetic: FXN 5 reverse 9:69037101-69037128; As/LbCpf1
taagtcctaacttttaagcactg

SEQ ID NO: 47019 - DNA, 24 bp, Artificial Sequence
  Synthetic: FXN 5 reverse 9:69037101-69037129; As/LbCpf1
taagtcctaacttttaagcactgg

SEQ ID NO: 47020 - DNA, 25 bp, Artificial Sequence
  Synthetic: FXN 5 reverse 9:69037101-69037130; As/LbCpf1
taagtcctaacttttaagcactggc

SEQ ID NO: 47021 - DNA, 18 bp, Artificial Sequence
  Synthetic: FXN 5 reverse 9:69037102-69037124; As/LbCpf1
ctaagtcctaacttttaa

SEQ ID NO: 47022 - DNA, 19 bp, Artificial Sequence
  Synthetic: FXN 5 reverse 9:69037102-69037125; As/LbCpf1
ctaagtcctaacttttaag

SEQ ID NO: 47023 - DNA, 20 bp, Artificial Sequence
  Synthetic: FXN 5 reverse 9:69037102-69037126; As/LbCpf1
ctaagtcctaacttttaagc

SEQ ID NO: 47024 - DNA, 21 bp, Artificial Sequence
  Synthetic: FXN 5 reverse 9:69037102-69037127; As/LbCpf1
ctaagtcctaacttttaagca

SEQ ID NO: 47025 - DNA, 22 bp, Artificial Sequence
  Synthetic: FXN 5 reverse 9:69037102-69037128; As/LbCpf1
ctaagtcctaacttttaagcac

SEQ ID NO: 47026 - DNA, 23 bp, Artificial Sequence
  Synthetic: FXN 5 reverse 9:69037102-69037129; As/LbCpf1
ctaagtcctaacttttaagcact

SEQ ID NO: 47027 - DNA, 24 bp, Artificial Sequence
  Synthetic: FXN 5 reverse 9:69037102-69037130; As/LbCpf1
ctaagtcctaacttttaagcactg

SEQ ID NO: 47028 - DNA, 25 bp, Artificial Sequence
  Synthetic: FXN 5 reverse 9:69037102-69037131; As/LbCpf1
ctaagtcctaacttttaagcactgg

SEQ ID NO: 47029 - DNA, 18 bp, Artificial Sequence
  Synthetic: FXN 5 forward 9:69037135-69037157; As/LbCpf1
ctggcaggacgcggtggc

SEQ ID NO: 47030 - DNA, 19 bp, Artificial Sequence
  Synthetic: FXN 5 forward 9:69037135-69037158; As/LbCpf1
ctggcaggacgcggtggct

SEQ ID NO: 47031 - DNA, 20 bp, Artificial Sequence
  Synthetic: FXN 5 forward 9:69037135-69037159; As/LbCpf1
ctggcaggacgcggtggctc

SEQ ID NO: 47032 - DNA, 21 bp, Artificial Sequence
  Synthetic: FXN 5 forward 9:69037135-69037160; As/LbCpf1
ctggcaggacgcggtggctca

SEQ ID NO: 47033 - DNA, 22 bp, Artificial Sequence
  Synthetic: FXN 5 forward 9:69037135-69037161; As/LbCpf1
ctggcaggacgcggtggctcat

SEQ ID NO: 47034 - DNA, 23 bp, Artificial Sequence
  Synthetic: FXN 5 forward 9:69037135-69037162; As/LbCpf1
ctggcaggacgcggtggctcatg

SEQ ID NO: 47035 - DNA, 24 bp, Artificial Sequence
  Synthetic: FXN 5 forward 9:69037135-69037163; As/LbCpf1
ctggcaggacgcggtggctcatgc

SEQ ID NO: 47036 - DNA, 25 bp, Artificial Sequence
  Synthetic: FXN 5 forward 9:69037135-69037164; As/LbCpf1
ctggcaggacgcggtggctcatgcc

SEQ ID NO: 47037 - DNA, 18 bp, Artificial Sequence
  Synthetic: FXN 5 forward 9:69037178-69037200; As/LbCpf1
ggaggcctaggaaggtgg

SEQ ID NO: 47038 - DNA, 19 bp, Artificial Sequence
  Synthetic: FXN 5 forward 9:69037178-69037201; As/LbCpf1
ggaggcctaggaaggtgga

SEQ ID NO: 47039 - DNA, 20 bp, Artificial Sequence
  Synthetic: FXN 5 forward 9:69037178-69037202; As/LbCpf1
ggaggcctaggaaggtggat

SEQ ID NO: 47040 - DNA, 21 bp, Artificial Sequence
  Synthetic: FXN 5 forward 9:69037178-69037203; As/LbCpf1
ggaggcctaggaaggtggatc

SEQ ID NO: 47041 - DNA, 22 bp, Artificial Sequence
  Synthetic: FXN 5 forward 9:69037178-69037204; As/LbCpf1
ggaggcctaggaaggtggatca

SEQ ID NO: 47042 - DNA, 23 bp, Artificial Sequence
  Synthetic: FXN 5 forward 9:69037178-69037205; As/LbCpf1
ggaggcctaggaaggtggatcac

SEQ ID NO: 47043 - DNA, 24 bp, Artificial Sequence
  Synthetic: FXN 5 forward 9:69037178-69037206; As/LbCpf1
ggaggcctaggaaggtggatcacc

SEQ ID NO: 47044 - DNA, 25 bp, Artificial Sequence
  Synthetic: FXN 5 forward 9:69037178-69037207; As/LbCpf1
ggaggcctaggaaggtggatcacct

SEQ ID NO: 47045 - DNA, 18 bp, Artificial Sequence
  Synthetic: FXN 5 reverse 9:69037219-69037241; As/LbCpf1
accatgttggccaggtta

SEQ ID NO: 47046 - DNA, 19 bp, Artificial Sequence
  Synthetic: FXN 5 reverse 9:69037219-69037242; As/LbCpf1
accatgttggccaggttag

SEQ ID NO: 47047 - DNA, 20 bp, Artificial Sequence
  Synthetic: FXN 5 reverse 9:69037219-69037243; As/LbCpf1
accatgttggccaggttagt

SEQ ID NO: 47048 - DNA, 21 bp, Artificial Sequence
  Synthetic: FXN 5 reverse 9:69037219-69037244; As/LbCpf1
accatgttggccaggttagtc

SEQ ID NO: 47049 - DNA, 22 bp, Artificial Sequence
  Synthetic: FXN 5 reverse 9:69037219-69037245; As/LbCpf1
accatgttggccaggttagtct

SEQ ID NO: 47050 - DNA, 23 bp, Artificial Sequence
  Synthetic: FXN 5 reverse 9:69037219-69037246; As/LbCpf1
accatgttggccaggttagtctt

SEQ ID NO: 47051 - DNA, 24 bp, Artificial Sequence
  Synthetic: FXN 5 reverse 9:69037219-69037247; As/LbCpf1
accatgttggccaggttagtcttg

SEQ ID NO: 47052 - DNA, 25 bp, Artificial Sequence
  Synthetic: FXN 5 reverse 9:69037219-69037248; As/LbCpf1
accatgttggccaggttagtcttga

SEQ ID NO: 47053 - DNA, 18 bp, Artificial Sequence
  Synthetic: FXN 5 reverse 9:69037235-69037257; As/LbCpf1
gtagatactgggtttcac

SEQ ID NO: 47054 - DNA, 19 bp, Artificial Sequence
  Synthetic: FXN 5 reverse 9:69037235-69037258; As/LbCpf1
gtagatactgggtttcacc

SEQ ID NO: 47055 - DNA, 20 bp, Artificial Sequence
  Synthetic: FXN 5 reverse 9:69037235-69037259; As/LbCpf1
gtagatactgggtttcacca

SEQ ID NO: 47056 - DNA, 21 bp, Artificial Sequence
  Synthetic: FXN 5 reverse 9:69037235-69037260; As/LbCpf1
gtagatactgggtttcaccat

SEQ ID NO: 47057 - DNA, 22 bp, Artificial Sequence
  Synthetic: FXN 5 reverse 9:69037235-69037261; As/LbCpf1
gtagatactgggtttcaccatg

SEQ ID NO: 47058 - DNA, 23 bp, Artificial Sequence
  Synthetic: FXN 5 reverse 9:69037235-69037262; As/LbCpf1
gtagatactgggtttcaccatgt

SEQ ID NO: 47059 - DNA, 24 bp, Artificial Sequence
  Synthetic: FXN 5 reverse 9:69037235-69037263; As/LbCpf1
gtagatactgggtttcaccatgtt

SEQ ID NO: 47060 - DNA, 25 bp, Artificial Sequence
  Synthetic: FXN 5 reverse 9:69037235-69037264; As/LbCpf1
gtagatactgggtttcaccatgttg

SEQ ID NO: 47061 - DNA, 18 bp, Artificial Sequence
  Synthetic: FXN 5 reverse 9:69037236-69037258; As/LbCpf1
agtagatactgggtttca

SEQ ID NO: 47062 - DNA, 19 bp, Artificial Sequence
  Synthetic: FXN 5 reverse 9:69037236-69037259; As/LbCpf1
agtagatactgggtttcac

SEQ ID NO: 47063 - DNA, 20 bp, Artificial Sequence
  Synthetic: FXN 5 reverse 9:69037236-69037260; As/LbCpf1
agtagatactgggtttcacc

SEQ ID NO: 47064 - DNA, 21 bp, Artificial Sequence
  Synthetic: FXN 5 reverse 9:69037236-69037261; As/LbCpf1
agtagatactgggtttcacca

SEQ ID NO: 47065 - DNA, 22 bp, Artificial Sequence
  Synthetic: FXN 5 reverse 9:69037236-69037262; As/LbCpf1
agtagatactgggtttcaccat

SEQ ID NO: 47066 - DNA, 23 bp, Artificial Sequence
  Synthetic: FXN 5 reverse 9:69037236-69037263; As/LbCpf1
agtagatactgggtttcaccatg

SEQ ID NO: 47067 - DNA, 24 bp, Artificial Sequence
  Synthetic: FXN 5 reverse 9:69037236-69037264; As/LbCpf1
agtagatactgggtttcaccatgt

SEQ ID NO: 47068 - DNA, 25 bp, Artificial Sequence
  Synthetic: FXN 5 reverse 9:69037236-69037265; As/LbCpf1
agtagatactgggtttcaccatgtt

SEQ ID NO: 47069 - DNA, 18 bp, Artificial Sequence
  Synthetic: FXN 5 reverse 9:69037237-69037259; As/LbCpf1
tagtagatactgggtttc

SEQ ID NO: 47070 - DNA, 19 bp, Artificial Sequence
  Synthetic: FXN 5 reverse 9:69037237-69037260; As/LbCpf1
tagtagatactgggtttca

SEQ ID NO: 47071 - DNA, 20 bp, Artificial Sequence
  Synthetic: FXN 5 reverse 9:69037237-69037261; As/LbCpf1
tagtagatactgggtttcac

SEQ ID NO: 47072 - DNA, 21 bp, Artificial Sequence
  Synthetic: FXN 5 reverse 9:69037237-69037262; As/LbCpf1
tagtagatactgggtttcacc

SEQ ID NO: 47073 - DNA, 22 bp, Artificial Sequence
  Synthetic: FXN 5 reverse 9:69037237-69037263; As/LbCpf1
tagtagatactgggtttcacca

SEQ ID NO: 47074 - DNA, 23 bp, Artificial Sequence
  Synthetic: FXN 5 reverse 9:69037237-69037264; As/LbCpf1
tagtagatactgggtttcaccat

SEQ ID NO: 47075 - DNA, 24 bp, Artificial Sequence
  Synthetic: FXN 5 reverse 9:69037237-69037265; As/LbCpf1
tagtagatactgggtttcaccatg

SEQ ID NO: 47076 - DNA, 25 bp, Artificial Sequence
  Synthetic: FXN 5 reverse 9:69037237-69037266; As/LbCpf1
tagtagatactgggtttcaccatgt

SEQ ID NO: 47077 - DNA, 18 bp, Artificial Sequence
  Synthetic: FXN 5 reverse 9:69037238-69037260; As/LbCpf1
ttagtagatactgggttt

SEQ ID NO: 47078 - DNA, 19 bp, Artificial Sequence
  Synthetic: FXN 5 reverse 9:69037238-69037261; As/LbCpf1
ttagtagatactgggtttc

SEQ ID NO: 47079 - DNA, 20 bp, Artificial Sequence
  Synthetic: FXN 5 reverse 9:69037238-69037262; As/LbCpf1
ttagtagatactgggtttca

SEQ ID NO: 47080 - DNA, 21 bp, Artificial Sequence
  Synthetic: FXN 5 reverse 9:69037238-69037263; As/LbCpf1
ttagtagatactgggtttcac

SEQ ID NO: 47081 - DNA, 22 bp, Artificial Sequence
  Synthetic: FXN 5 reverse 9:69037238-69037264; As/LbCpf1
ttagtagatactgggtttcacc

SEQ ID NO: 47082 - DNA, 23 bp, Artificial Sequence
  Synthetic: FXN 5 reverse 9:69037238-69037265; As/LbCpf1
ttagtagatactgggtttcacca

SEQ ID NO: 47083 - DNA, 24 bp, Artificial Sequence
  Synthetic: FXN 5 reverse 9:69037238-69037266; As/LbCpf1
ttagtagatactgggtttcaccat

SEQ ID NO: 47084 - DNA, 25 bp, Artificial Sequence
  Synthetic: FXN 5 reverse 9:69037238-69037267; As/LbCpf1
ttagtagatactgggtttcaccatg

SEQ ID NO: 47085 - DNA, 18 bp, Artificial Sequence
  Synthetic: FXN 5 reverse 9:69037244-69037266; As/LbCpf1
tattttttagtagatact

SEQ ID NO: 47086 - DNA, 19 bp, Artificial Sequence
  Synthetic: FXN 5 reverse 9:69037244-69037267; As/LbCpf1
tattttttagtagatactg

SEQ ID NO: 47087 - DNA, 20 bp, Artificial Sequence
  Synthetic: FXN 5 reverse 9:69037244-69037268; As/LbCpf1
tattttttagtagatactgg

SEQ ID NO: 47088 - DNA, 21 bp, Artificial Sequence
  Synthetic: FXN 5 reverse 9:69037244-69037269; As/LbCpf1
tattttttagtagatactggg

SEQ ID NO: 47089 - DNA, 22 bp, Artificial Sequence
  Synthetic: FXN 5 reverse 9:69037244-69037270; As/LbCpf1
tattttttagtagatactgggt

SEQ ID NO: 47090 - DNA, 23 bp, Artificial Sequence
  Synthetic: FXN 5 reverse 9:69037244-69037271; As/LbCpf1
tattttttagtagatactgggtt

SEQ ID NO: 47091 - DNA, 24 bp, Artificial Sequence
  Synthetic: FXN 5 reverse 9:69037244-69037272; As/LbCpf1
tattttttagtagatactgggttt

SEQ ID NO: 47092 - DNA, 25 bp, Artificial Sequence
  Synthetic: FXN 5 reverse 9:69037244-69037273; As/LbCpf1
tattttttagtagatactgggtttc

SEQ ID NO: 47093 - DNA, 18 bp, Artificial Sequence
  Synthetic: FXN 5 reverse 9:69037245-69037267; As/LbCpf1
gtattttttagtagatac

SEQ ID NO: 47094 - DNA, 19 bp, Artificial Sequence
  Synthetic: FXN 5 reverse 9:69037245-69037268; As/LbCpf1
gtattttttagtagatact

SEQ ID NO: 47095 - DNA, 20 bp, Artificial Sequence
  Synthetic: FXN 5 reverse 9:69037245-69037269; As/LbCpf1
gtattttttagtagatactg

SEQ ID NO: 47096 - DNA, 21 bp, Artificial Sequence
  Synthetic: FXN 5 reverse 9:69037245-69037270; As/LbCpf1
gtattttttagtagatactgg

SEQ ID NO: 47097 - DNA, 22 bp, Artificial Sequence
  Synthetic: FXN 5 reverse 9:69037245-69037271; As/LbCpf1
gtattttttagtagatactggg

SEQ ID NO: 47098 - DNA, 23 bp, Artificial Sequence
  Synthetic: FXN 5 reverse 9:69037245-69037272; As/LbCpf1
gtattttttagtagatactgggt

SEQ ID NO: 47099 - DNA, 24 bp, Artificial Sequence
  Synthetic: FXN 5 reverse 9:69037245-69037273; As/LbCpf1
gtattttttagtagatactgggtt

SEQ ID NO: 47100 - DNA, 25 bp, Artificial Sequence
  Synthetic: FXN 5 reverse 9:69037245-69037274; As/LbCpf1
gtattttttagtagatactgggttt

SEQ ID NO: 47101 - DNA, 18 bp, Artificial Sequence
  Synthetic: FXN 5 reverse 9:69037246-69037268; As/LbCpf1
tgtattttttagtagata

SEQ ID NO: 47102 - DNA, 19 bp, Artificial Sequence
  Synthetic: FXN 5 reverse 9:69037246-69037269; As/LbCpf1
tgtattttttagtagatac

SEQ ID NO: 47103 - DNA, 20 bp, Artificial Sequence
  Synthetic: FXN 5 reverse 9:69037246-69037270; As/LbCpf1
tgtattttttagtagatact

SEQ ID NO: 47104 - DNA, 21 bp, Artificial Sequence
  Synthetic: FXN 5 reverse 9:69037246-69037271; As/LbCpf1
tgtattttttagtagatactg

SEQ ID NO: 47105 - DNA, 22 bp, Artificial Sequence
  Synthetic: FXN 5 reverse 9:69037246-69037272; As/LbCpf1
tgtattttttagtagatactgg

SEQ ID NO: 47106 - DNA, 23 bp, Artificial Sequence
  Synthetic: FXN 5 reverse 9:69037246-69037273; As/LbCpf1
tgtattttttagtagatactggg

SEQ ID NO: 47107 - DNA, 24 bp, Artificial Sequence
  Synthetic: FXN 5 reverse 9:69037246-69037274; As/LbCpf1
tgtattttttagtagatactgggt

SEQ ID NO: 47108 - DNA, 25 bp, Artificial Sequence
  Synthetic: FXN 5 reverse 9:69037246-69037275; As/LbCpf1
tgtattttttagtagatactgggtt

SEQ ID NO: 47109 - DNA, 18 bp, Artificial Sequence
  Synthetic: FXN 5 reverse 9:69037247-69037269; As/LbCpf1
ttgtattttttagtagat

SEQ ID NO: 47110 - DNA, 19 bp, Artificial Sequence
  Synthetic: FXN 5 reverse 9:69037247-69037270; As/LbCpf1
ttgtattttttagtagata

SEQ ID NO: 47111 - DNA, 20 bp, Artificial Sequence
  Synthetic: FXN 5 reverse 9:69037247-69037271; As/LbCpf1
ttgtattttttagtagatac

SEQ ID NO: 47112 - DNA, 21 bp, Artificial Sequence
  Synthetic: FXN 5 reverse 9:69037247-69037272; As/LbCpf1
ttgtattttttagtagatact

SEQ ID NO: 47113 - DNA, 22 bp, Artificial Sequence
  Synthetic: FXN 5 reverse 9:69037247-69037273; As/LbCpf1
ttgtattttttagtagatactg

SEQ ID NO: 47114 - DNA, 23 bp, Artificial Sequence
  Synthetic: FXN 5 reverse 9:69037247-69037274; As/LbCpf1
ttgtattttttagtagatactgg

SEQ ID NO: 47115 - DNA, 24 bp, Artificial Sequence
  Synthetic: FXN 5 reverse 9:69037247-69037275; As/LbCpf1
ttgtattttttagtagatactggg

SEQ ID NO: 47116 - DNA, 25 bp, Artificial Sequence
  Synthetic: FXN 5 reverse 9:69037247-69037276; As/LbCpf1
ttgtattttttagtagatactgggt

SEQ ID NO: 47117 - DNA, 18 bp, Artificial Sequence
  Synthetic: FXN 5 reverse 9:69037248-69037270; As/LbCpf1
tttgtattttttagtaga

SEQ ID NO: 47118 - DNA, 19 bp, Artificial Sequence
  Synthetic: FXN 5 reverse 9:69037248-69037271; As/LbCpf1
tttgtattttttagtagat

SEQ ID NO: 47119 - DNA, 20 bp, Artificial Sequence
  Synthetic: FXN 5 reverse 9:69037248-69037272; As/LbCpf1
tttgtattttttagtagata

SEQ ID NO: 47120 - DNA, 21 bp, Artificial Sequence
  Synthetic: FXN 5 reverse 9:69037248-69037273; As/LbCpf1
tttgtattttttagtagatac

SEQ ID NO: 47121 - DNA, 22 bp, Artificial Sequence
  Synthetic: FXN 5 reverse 9:69037248-69037274; As/LbCpf1
tttgtattttttagtagatact

SEQ ID NO: 47122 - DNA, 23 bp, Artificial Sequence
  Synthetic: FXN 5 reverse 9:69037248-69037275; As/LbCpf1
tttgtattttttagtagatactg

SEQ ID NO: 47123 - DNA, 24 bp, Artificial Sequence
  Synthetic: FXN 5 reverse 9:69037248-69037276; As/LbCpf1
tttgtattttttagtagatactgg

SEQ ID NO: 47124 - DNA, 25 bp, Artificial Sequence
  Synthetic: FXN 5 reverse 9:69037248-69037277; As/LbCpf1
tttgtattttttagtagatactggg

SEQ ID NO: 47125 - DNA, 18 bp, Artificial Sequence
  Synthetic: FXN 5 reverse 9:69037249-69037271; As/LbCpf1
ttttgtattttttagtag

SEQ ID NO: 47126 - DNA, 19 bp, Artificial Sequence
  Synthetic: FXN 5 reverse 9:69037249-69037272; As/LbCpf1
ttttgtattttttagtaga

SEQ ID NO: 47127 - DNA, 20 bp, Artificial Sequence
  Synthetic: FXN 5 reverse 9:69037249-69037273; As/LbCpf1
ttttgtattttttagtagat

SEQ ID NO: 47128 - DNA, 21 bp, Artificial Sequence
  Synthetic: FXN 5 reverse 9:69037249-69037274; As/LbCpf1
ttttgtattttttagtagata

SEQ ID NO: 47129 - DNA, 22 bp, Artificial Sequence
  Synthetic: FXN 5 reverse 9:69037249-69037275; As/LbCpf1
ttttgtattttttagtagatac

SEQ ID NO: 47130 - DNA, 23 bp, Artificial Sequence
  Synthetic: FXN 5 reverse 9:69037249-69037276; As/LbCpf1
ttttgtattttttagtagatact

SEQ ID NO: 47131 - DNA, 24 bp, Artificial Sequence
  Synthetic: FXN 5 reverse 9:69037249-69037277; As/LbCpf1
ttttgtattttttagtagatactg

SEQ ID NO: 47132 - DNA, 25 bp, Artificial Sequence
  Synthetic: FXN 5 reverse 9:69037249-69037278; As/LbCpf1
ttttgtattttttagtagatactgg

SEQ ID NO: 47133 - DNA, 18 bp, Artificial Sequence
  Synthetic: FXN 5 reverse 9:69037250-69037272; As/LbCpf1
tttttgtattttttagta

SEQ ID NO: 47134 - DNA, 19 bp, Artificial Sequence
  Synthetic: FXN 5 reverse 9:69037250-69037273; As/LbCpf1
tttttgtattttttagtag

SEQ ID NO: 47135 - DNA, 20 bp, Artificial Sequence
  Synthetic: FXN 5 reverse 9:69037250-69037274; As/LbCpf1
tttttgtattttttagtaga

SEQ ID NO: 47136 - DNA, 21 bp, Artificial Sequence
  Synthetic: FXN 5 reverse 9:69037250-69037275; As/LbCpf1
tttttgtattttttagtagat

SEQ ID NO: 47137 - DNA, 22 bp, Artificial Sequence
  Synthetic: FXN 5 reverse 9:69037250-69037276; As/LbCpf1
tttttgtattttttagtagata

SEQ ID NO: 47138 - DNA, 23 bp, Artificial Sequence
  Synthetic: FXN 5 reverse 9:69037250-69037277; As/LbCpf1
tttttgtattttttagtagatac

SEQ ID NO: 47139 - DNA, 24 bp, Artificial Sequence
  Synthetic: FXN 5 reverse 9:69037250-69037278; As/LbCpf1
tttttgtattttttagtagatact

SEQ ID NO: 47140 - DNA, 25 bp, Artificial Sequence
  Synthetic: FXN 5 reverse 9:69037250-69037279; As/LbCpf1
tttttgtattttttagtagatactg

SEQ ID NO: 47141 - DNA, 18 bp, Artificial Sequence
  Synthetic: FXN 5 reverse 9:69037251-69037273; As/LbCpf1
ttttttgtattttttagt

SEQ ID NO: 47142 - DNA, 19 bp, Artificial Sequence
  Synthetic: FXN 5 reverse 9:69037251-69037274; As/LbCpf1
ttttttgtattttttagta

SEQ ID NO: 47143 - DNA, 20 bp, Artificial Sequence
  Synthetic: FXN 5 reverse 9:69037251-69037275; As/LbCpf1
ttttttgtattttttagtag

SEQ ID NO: 47144 - DNA, 21 bp, Artificial Sequence
  Synthetic: FXN 5 reverse 9:69037251-69037276; As/LbCpf1
ttttttgtattttttagtaga

SEQ ID NO: 47145 - DNA, 22 bp, Artificial Sequence
  Synthetic: FXN 5 reverse 9:69037251-69037277; As/LbCpf1
ttttttgtattttttagtagat

SEQ ID NO: 47146 - DNA, 23 bp, Artificial Sequence
  Synthetic: FXN 5 reverse 9:69037251-69037278; As/LbCpf1
ttttttgtattttttagtagata

SEQ ID NO: 47147 - DNA, 24 bp, Artificial Sequence
  Synthetic: FXN 5 reverse 9:69037251-69037279; As/LbCpf1
ttttttgtattttttagtagatac

SEQ ID NO: 47148 - DNA, 25 bp, Artificial Sequence
  Synthetic: FXN 5 reverse 9:69037251-69037280; As/LbCpf1
ttttttgtattttttagtagatact

SEQ ID NO: 47149 - DNA, 18 bp, Artificial Sequence
  Synthetic: FXN 5 reverse 9:69037252-69037274; As/LbCpf1
tttttttgtattttttag

SEQ ID NO: 47150 - DNA, 19 bp, Artificial Sequence
  Synthetic: FXN 5 reverse 9:69037252-69037275; As/LbCpf1
tttttttgtattttttagt

SEQ ID NO: 47151 - DNA, 20 bp, Artificial Sequence
  Synthetic: FXN 5 reverse 9:69037252-69037276; As/LbCpf1
tttttttgtattttttagta

SEQ ID NO: 47152 - DNA, 21 bp, Artificial Sequence
  Synthetic: FXN 5 reverse 9:69037252-69037277; As/LbCpf1
tttttttgtattttttagtag

SEQ ID NO: 47153 - DNA, 22 bp, Artificial Sequence
  Synthetic: FXN 5 reverse 9:69037252-69037278; As/LbCpf1
tttttttgtattttttagtaga

SEQ ID NO: 47154 - DNA, 23 bp, Artificial Sequence
  Synthetic: FXN 5 reverse 9:69037252-69037279; As/LbCpf1
tttttttgtattttttagtagat

SEQ ID NO: 47155 - DNA, 24 bp, Artificial Sequence
  Synthetic: FXN 5 reverse 9:69037252-69037280; As/LbCpf1
tttttttgtattttttagtagata

SEQ ID NO: 47156 - DNA, 25 bp, Artificial Sequence
  Synthetic: FXN 5 reverse 9:69037252-69037281; As/LbCpf1
tttttttgtattttttagtagatac

SEQ ID NO: 47157 - DNA, 18 bp, Artificial Sequence
  Synthetic: FXN 5 reverse 9:69037253-69037275; As/LbCpf1
ttttttttgtatttttta

SEQ ID NO: 47158 - DNA, 19 bp, Artificial Sequence
  Synthetic: FXN 5 reverse 9:69037253-69037276; As/LbCpf1
ttttttttgtattttttag

SEQ ID NO: 47159 - DNA, 20 bp, Artificial Sequence
  Synthetic: FXN 5 reverse 9:69037253-69037277; As/LbCpf1
ttttttttgtattttttagt

SEQ ID NO: 47160 - DNA, 21 bp, Artificial Sequence
  Synthetic: FXN 5 reverse 9:69037253-69037278; As/LbCpf1
ttttttttgtattttttagta

SEQ ID NO: 47161 - DNA, 22 bp, Artificial Sequence
  Synthetic: FXN 5 reverse 9:69037253-69037279; As/LbCpf1
ttttttttgtattttttagtag

SEQ ID NO: 47162 - DNA, 23 bp, Artificial Sequence
  Synthetic: FXN 5 reverse 9:69037253-69037280; As/LbCpf1
ttttttttgtattttttagtaga

SEQ ID NO: 47163 - DNA, 24 bp, Artificial Sequence
  Synthetic: FXN 5 reverse 9:69037253-69037281; As/LbCpf1
ttttttttgtattttttagtagat

SEQ ID NO: 47164 - DNA, 25 bp, Artificial Sequence
  Synthetic: FXN 5 reverse 9:69037253-69037282; As/LbCpf1
ttttttttgtattttttagtagata

SEQ ID NO: 47165 - DNA, 18 bp, Artificial Sequence
  Synthetic: FXN 5 reverse 9:69037254-69037276; As/LbCpf1
tttttttttgtatttttt

SEQ ID NO: 47166 - DNA, 19 bp, Artificial Sequence
  Synthetic: FXN 5 reverse 9:69037254-69037277; As/LbCpf1
tttttttttgtatttttta

SEQ ID NO: 47167 - DNA, 20 bp, Artificial Sequence
  Synthetic: FXN 5 reverse 9:69037254-69037278; As/LbCpf1
tttttttttgtattttttag

SEQ ID NO: 47168 - DNA, 21 bp, Artificial Sequence
  Synthetic: FXN 5 reverse 9:69037254-69037279; As/LbCpf1
tttttttttgtattttttagt

SEQ ID NO: 47169 - DNA, 22 bp, Artificial Sequence
  Synthetic: FXN 5 reverse 9:69037254-69037280; As/LbCpf1
tttttttttgtattttttagta

SEQ ID NO: 47170 - DNA, 23 bp, Artificial Sequence
  Synthetic: FXN 5 reverse 9:69037254-69037281; As/LbCpf1
tttttttttgtattttttagtag

SEQ ID NO: 47171 - DNA, 24 bp, Artificial Sequence
  Synthetic: FXN 5 reverse 9:69037254-69037282; As/LbCpf1
tttttttttgtattttttagtaga

SEQ ID NO: 47172 - DNA, 25 bp, Artificial Sequence
  Synthetic: FXN 5 reverse 9:69037254-69037283; As/LbCpf1
tttttttttgtattttttagtagat

SEQ ID NO: 47173 - DNA, 18 bp, Artificial Sequence
  Synthetic: FXN 5 reverse 9:69037255-69037277; As/LbCpf1
ttttttttttgtattttt

SEQ ID NO: 47174 - DNA, 19 bp, Artificial Sequence
  Synthetic: FXN 5 reverse 9:69037255-69037278; As/LbCpf1
ttttttttttgtatttttt

SEQ ID NO: 47175 - DNA, 20 bp, Artificial Sequence
  Synthetic: FXN 5 reverse 9:69037255-69037279; As/LbCpf1
ttttttttttgtatttttta

SEQ ID NO: 47176 - DNA, 21 bp, Artificial Sequence
  Synthetic: FXN 5 reverse 9:69037255-69037280; As/LbCpf1
ttttttttttgtattttttag

SEQ ID NO: 47177 - DNA, 22 bp, Artificial Sequence
  Synthetic: FXN 5 reverse 9:69037255-69037281; As/LbCpf1
ttttttttttgtattttttagt

SEQ ID NO: 47178 - DNA, 23 bp, Artificial Sequence
  Synthetic: FXN 5 reverse 9:69037255-69037282; As/LbCpf1
ttttttttttgtattttttagta

SEQ ID NO: 47179 - DNA, 24 bp, Artificial Sequence
  Synthetic: FXN 5 reverse 9:69037255-69037283; As/LbCpf1
ttttttttttgtattttttagtag

SEQ ID NO: 47180 - DNA, 25 bp, Artificial Sequence
  Synthetic: FXN 5 reverse 9:69037255-69037284; As/LbCpf1
ttttttttttgtattttttagtaga

SEQ ID NO: 47181 - DNA, 18 bp, Artificial Sequence
  Synthetic: FXN 5 reverse 9:69037256-69037278; As/LbCpf1
tttttttttttgtatttt

SEQ ID NO: 47182 - DNA, 19 bp, Artificial Sequence
  Synthetic: FXN 5 reverse 9:69037256-69037279; As/LbCpf1
tttttttttttgtattttt

SEQ ID NO: 47183 - DNA, 20 bp, Artificial Sequence
  Synthetic: FXN 5 reverse 9:69037256-69037280; As/LbCpf1
tttttttttttgtatttttt

SEQ ID NO: 47184 - DNA, 21 bp, Artificial Sequence
  Synthetic: FXN 5 reverse 9:69037256-69037281; As/LbCpf1
tttttttttttgtatttttta

SEQ ID NO: 47185 - DNA, 22 bp, Artificial Sequence
  Synthetic: FXN 5 reverse 9:69037256-69037282; As/LbCpf1
tttttttttttgtattttttag

SEQ ID NO: 47186 - DNA, 23 bp, Artificial Sequence
  Synthetic: FXN 5 reverse 9:69037256-69037283; As/LbCpf1
tttttttttttgtattttttagt

SEQ ID NO: 47187 - DNA, 24 bp, Artificial Sequence
  Synthetic: FXN 5 reverse 9:69037256-69037284; As/LbCpf1
tttttttttttgtattttttagta

SEQ ID NO: 47188 - DNA, 25 bp, Artificial Sequence
  Synthetic: FXN 5 reverse 9:69037256-69037285; As/LbCpf1
tttttttttttgtattttttagtag

SEQ ID NO: 47189 - DNA, 18 bp, Artificial Sequence
  Synthetic: FXN 5 reverse 9:69037257-69037279; As/LbCpf1
ttttttttttttgtattt

SEQ ID NO: 47190 - DNA, 19 bp, Artificial Sequence
  Synthetic: FXN 5 reverse 9:69037257-69037280; As/LbCpf1
ttttttttttttgtatttt

SEQ ID NO: 47191 - DNA, 20 bp, Artificial Sequence
  Synthetic: FXN 5 reverse 9:69037257-69037281; As/LbCpf1
ttttttttttttgtattttt

SEQ ID NO: 47192 - DNA, 21 bp, Artificial Sequence
  Synthetic: FXN 5 reverse 9:69037257-69037282; As/LbCpf1
ttttttttttttgtatttttt

SEQ ID NO: 47193 - DNA, 22 bp, Artificial Sequence
  Synthetic: FXN 5 reverse 9:69037257-69037283; As/LbCpf1
ttttttttttttgtatttttta

SEQ ID NO: 47194 - DNA, 23 bp, Artificial Sequence
  Synthetic: FXN 5 reverse 9:69037257-69037284; As/LbCpf1
ttttttttttttgtattttttag

SEQ ID NO: 47195 - DNA, 24 bp, Artificial Sequence
  Synthetic: FXN 5 reverse 9:69037257-69037285; As/LbCpf1
ttttttttttttgtattttttagt

SEQ ID NO: 47196 - DNA, 25 bp, Artificial Sequence
  Synthetic: FXN 5 reverse 9:69037257-69037286; As/LbCpf1
ttttttttttttgtattttttagta

SEQ ID NO: 47197 - DNA, 18 bp, Artificial Sequence
  Synthetic: FXN 5 reverse 9:69037276-69037298; As/LbCpf1
ttcttcttcttcttcttt

SEQ ID NO: 47198 - DNA, 19 bp, Artificial Sequence
  Synthetic: FXN 5 reverse 9:69037276-69037299; As/LbCpf1
ttcttcttcttcttctttt

SEQ ID NO: 47199 - DNA, 20 bp, Artificial Sequence
  Synthetic: FXN 5 reverse 9:69037276-69037300; As/LbCpf1
ttcttcttcttcttcttttt

SEQ ID NO: 47200 - DNA, 21 bp, Artificial Sequence
  Synthetic: FXN 5 reverse 9:69037276-69037301; As/LbCpf1
ttcttcttcttcttctttttt

SEQ ID NO: 47201 - DNA, 22 bp, Artificial Sequence
  Synthetic: FXN 5 reverse 9:69037276-69037302; As/LbCpf1
ttcttcttcttcttcttttttt

SEQ ID NO: 47202 - DNA, 23 bp, Artificial Sequence
  Synthetic: FXN 5 reverse 9:69037276-69037303; As/LbCpf1
ttcttcttcttcttctttttttt

SEQ ID NO: 47203 - DNA, 24 bp, Artificial Sequence
  Synthetic: FXN 5 reverse 9:69037276-69037304; As/LbCpf1
ttcttcttcttcttcttttttttt

SEQ ID NO: 47204 - DNA, 25 bp, Artificial Sequence
  Synthetic: FXN 5 reverse 9:69037276-69037305; As/LbCpf1
ttcttcttcttcttctttttttttt

SEQ ID NO: 47205 - DNA, 18 bp, Artificial Sequence
  Synthetic: FXN 5 reverse 9:69037277-69037299; As/LbCpf1
cttcttcttcttcttctt

SEQ ID NO: 47206 - DNA, 19 bp, Artificial Sequence
  Synthetic: FXN 5 reverse 9:69037277-69037300; As/LbCpf1
cttcttcttcttcttcttt

SEQ ID NO: 47207 - DNA, 20 bp, Artificial Sequence
  Synthetic: FXN 5 reverse 9:69037277-69037301; As/LbCpf1
cttcttcttcttcttctttt

SEQ ID NO: 47208 - DNA, 21 bp, Artificial Sequence
  Synthetic: FXN 5 reverse 9:69037277-69037302; As/LbCpf1
cttcttcttcttcttcttttt

SEQ ID NO: 47209 - DNA, 22 bp, Artificial Sequence
  Synthetic: FXN 5 reverse 9:69037277-69037303; As/LbCpf1
cttcttcttcttcttctttttt

SEQ ID NO: 47210 - DNA, 23 bp, Artificial Sequence
  Synthetic: FXN 5 reverse 9:69037277-69037304; As/LbCpf1
cttcttcttcttcttcttttttt

SEQ ID NO: 47211 - DNA, 24 bp, Artificial Sequence
  Synthetic: FXN 5 reverse 9:69037277-69037305; As/LbCpf1
cttcttcttcttcttctttttttt

SEQ ID NO: 47212 - DNA, 25 bp, Artificial Sequence
  Synthetic: FXN 5 reverse 9:69037277-69037306; As/LbCpf1
cttcttcttcttcttcttttttttt

SEQ ID NO: 47213 - DNA, 18 bp, Artificial Sequence
  Synthetic: FXN 5 forward 9:69035954-69035976; AsCpf1-1
cgccgggaacagccgcgg

SEQ ID NO: 47214 - DNA, 19 bp, Artificial Sequence
  Synthetic: FXN 5 forward 9:69035954-69035977; AsCpf1-1
cgccgggaacagccgcggg

SEQ ID NO: 47215 - DNA, 20 bp, Artificial Sequence
  Synthetic: FXN 5 forward 9:69035954-69035978; AsCpf1-1
cgccgggaacagccgcgggc

SEQ ID NO: 47216 - DNA, 21 bp, Artificial Sequence
  Synthetic: FXN 5 forward 9:69035954-69035979; AsCpf1-1
cgccgggaacagccgcgggcc

SEQ ID NO: 47217 - DNA, 22 bp, Artificial Sequence
  Synthetic: FXN 5 forward 9:69035954-69035980; AsCpf1-1
cgccgggaacagccgcgggccg

SEQ ID NO: 47218 - DNA, 23 bp, Artificial Sequence
  Synthetic: FXN 5 forward 9:69035954-69035981; AsCpf1-1
cgccgggaacagccgcgggccgc

SEQ ID NO: 47219 - DNA, 24 bp, Artificial Sequence
  Synthetic: FXN 5 forward 9:69035954-69035982; AsCpf1-1
cgccgggaacagccgcgggccgca

SEQ ID NO: 47220 - DNA, 25 bp, Artificial Sequence
  Synthetic: FXN 5 forward 9:69035954-69035983; AsCpf1-1
cgccgggaacagccgcgggccgcac

SEQ ID NO: 47221 - DNA, 18 bp, Artificial Sequence
  Synthetic: FXN 5 reverse 9:69035988-69036010; AsCpf1-1
tgcgcaggcgtgcggcgt

SEQ ID NO: 47222 - DNA, 19 bp, Artificial Sequence
  Synthetic: FXN 5 reverse 9:69035988-69036011; AsCpf1-1
tgcgcaggcgtgcggcgtg

SEQ ID NO: 47223 - DNA, 20 bp, Artificial Sequence
  Synthetic: FXN 5 reverse 9:69035988-69036012; AsCpf1-1
tgcgcaggcgtgcggcgtgc

SEQ ID NO: 47224 - DNA, 21 bp, Artificial Sequence
  Synthetic: FXN 5 reverse 9:69035988-69036013; AsCpf1-1
tgcgcaggcgtgcggcgtgcg

SEQ ID NO: 47225 - DNA, 22 bp, Artificial Sequence
  Synthetic: FXN 5 reverse 9:69035988-69036014; AsCpf1-1
tgcgcaggcgtgcggcgtgcgg

SEQ ID NO: 47226 - DNA, 23 bp, Artificial Sequence
  Synthetic: FXN 5 reverse 9:69035988-69036015; AsCpf1-1
tgcgcaggcgtgcggcgtgcggc

SEQ ID NO: 47227 - DNA, 24 bp, Artificial Sequence
  Synthetic: FXN 5 reverse 9:69035988-69036016; AsCpf1-1
tgcgcaggcgtgcggcgtgcggcc

SEQ ID NO: 47228 - DNA, 25 bp, Artificial Sequence
  Synthetic: FXN 5 reverse 9:69035988-69036017; AsCpf1-1
tgcgcaggcgtgcggcgtgcggccc

SEQ ID NO: 47229 - DNA, 18 bp, Artificial Sequence
  Synthetic: FXN 5 reverse 9:69036030-69036052; AsCpf1-1
gcgcgcgtacccggagcg

SEQ ID NO: 47230 - DNA, 19 bp, Artificial Sequence
  Synthetic: FXN 5 reverse 9:69036030-69036053; AsCpf1-1
gcgcgcgtacccggagcga

SEQ ID NO: 47231 - DNA, 20 bp, Artificial Sequence
  Synthetic: FXN 5 reverse 9:69036030-69036054; AsCpf1-1
gcgcgcgtacccggagcgac

SEQ ID NO: 47232 - DNA, 21 bp, Artificial Sequence
  Synthetic: FXN 5 reverse 9:69036030-69036055; AsCpf1-1
gcgcgcgtacccggagcgacc

SEQ ID NO: 47233 - DNA, 22 bp, Artificial Sequence
  Synthetic: FXN 5 reverse 9:69036030-69036056; AsCpf1-1
gcgcgcgtacccggagcgaccc

SEQ ID NO: 47234 - DNA, 23 bp, Artificial Sequence
  Synthetic: FXN 5 reverse 9:69036030-69036057; AsCpf1-1
gcgcgcgtacccggagcgacccc

SEQ ID NO: 47235 - DNA, 24 bp, Artificial Sequence
  Synthetic: FXN 5 reverse 9:69036030-69036058; AsCpf1-1
gcgcgcgtacccggagcgaccccg

SEQ ID NO: 47236 - DNA, 25 bp, Artificial Sequence
  Synthetic: FXN 5 reverse 9:69036030-69036059; AsCpf1-1
gcgcgcgtacccggagcgaccccgg

SEQ ID NO: 47237 - DNA, 18 bp, Artificial Sequence
  Synthetic: FXN 5 forward 9:69036040-69036062; AsCpf1-1
ggtacgcgcgctggacta

SEQ ID NO: 47238 - DNA, 19 bp, Artificial Sequence
  Synthetic: FXN 5 forward 9:69036040-69036063; AsCpf1-1
ggtacgcgcgctggactag

SEQ ID NO: 47239 - DNA, 20 bp, Artificial Sequence
  Synthetic: FXN 5 forward 9:69036040-69036064; AsCpf1-1
ggtacgcgcgctggactagc

SEQ ID NO: 47240 - DNA, 21 bp, Artificial Sequence
  Synthetic: FXN 5 forward 9:69036040-69036065; AsCpf1-1
ggtacgcgcgctggactagct

SEQ ID NO: 47241 - DNA, 22 bp, Artificial Sequence
  Synthetic: FXN 5 forward 9:69036040-69036066; AsCpf1-1
ggtacgcgcgctggactagctc

SEQ ID NO: 47242 - DNA, 23 bp, Artificial Sequence
  Synthetic: FXN 5 forward 9:69036040-69036067; AsCpf1-1
ggtacgcgcgctggactagctca

SEQ ID NO: 47243 - DNA, 24 bp, Artificial Sequence
  Synthetic: FXN 5 forward 9:69036040-69036068; AsCpf1-1
ggtacgcgcgctggactagctcac

SEQ ID NO: 47244 - DNA, 25 bp, Artificial Sequence
  Synthetic: FXN 5 forward 9:69036040-69036069; AsCpf1-1
ggtacgcgcgctggactagctcacc

SEQ ID NO: 47245 - DNA, 18 bp, Artificial Sequence
  Synthetic: FXN 5 reverse 9:69036068-69036090; AsCpf1-1
ccgggccgccctgagaag

SEQ ID NO: 47246 - DNA, 19 bp, Artificial Sequence
  Synthetic: FXN 5 reverse 9:69036068-69036091; AsCpf1-1
ccgggccgccctgagaagg

SEQ ID NO: 47247 - DNA, 20 bp, Artificial Sequence
  Synthetic: FXN 5 reverse 9:69036068-69036092; AsCpf1-1
ccgggccgccctgagaagga

SEQ ID NO: 47248 - DNA, 21 bp, Artificial Sequence
  Synthetic: FXN 5 reverse 9:69036068-69036093; AsCpf1-1
ccgggccgccctgagaaggag

SEQ ID NO: 47249 - DNA, 22 bp, Artificial Sequence
  Synthetic: FXN 5 reverse 9:69036068-69036094; AsCpf1-1
ccgggccgccctgagaaggagc

SEQ ID NO: 47250 - DNA, 23 bp, Artificial Sequence
  Synthetic: FXN 5 reverse 9:69036068-69036095; AsCpf1-1
ccgggccgccctgagaaggagcg

SEQ ID NO: 47251 - DNA, 24 bp, Artificial Sequence
  Synthetic: FXN 5 reverse 9:69036068-69036096; AsCpf1-1
ccgggccgccctgagaaggagcgg

SEQ ID NO: 47252 - DNA, 25 bp, Artificial Sequence
  Synthetic: FXN 5 reverse 9:69036068-69036097; AsCpf1-1
ccgggccgccctgagaaggagcggg

SEQ ID NO: 47253 - DNA, 18 bp, Artificial Sequence
  Synthetic: FXN 5 reverse 9:69036069-69036091; AsCpf1-1
gccgggccgccctgagaa

SEQ ID NO: 47254 - DNA, 19 bp, Artificial Sequence
  Synthetic: FXN 5 reverse 9:69036069-69036092; AsCpf1-1
gccgggccgccctgagaag

SEQ ID NO: 47255 - DNA, 20 bp, Artificial Sequence
  Synthetic: FXN 5 reverse 9:69036069-69036093; AsCpf1-1
gccgggccgccctgagaagg

SEQ ID NO: 47256 - DNA, 21 bp, Artificial Sequence
  Synthetic: FXN 5 reverse 9:69036069-69036094; AsCpf1-1
gccgggccgccctgagaagga

SEQ ID NO: 47257 - DNA, 22 bp, Artificial Sequence
  Synthetic: FXN 5 reverse 9:69036069-69036095; AsCpf1-1
gccgggccgccctgagaaggag

SEQ ID NO: 47258 - DNA, 23 bp, Artificial Sequence
  Synthetic: FXN 5 reverse 9:69036069-69036096; AsCpf1-1
gccgggccgccctgagaaggagc

SEQ ID NO: 47259 - DNA, 24 bp, Artificial Sequence
  Synthetic: FXN 5 reverse 9:69036069-69036097; AsCpf1-1
gccgggccgccctgagaaggagcg

SEQ ID NO: 47260 - DNA, 25 bp, Artificial Sequence
  Synthetic: FXN 5 reverse 9:69036069-69036098; AsCpf1-1
gccgggccgccctgagaaggagcgg

SEQ ID NO: 47261 - DNA, 18 bp, Artificial Sequence
  Synthetic: FXN 5 forward 9:69036111-69036133; AsCpf1-1
ttctctggttctcccggt

SEQ ID NO: 47262 - DNA, 19 bp, Artificial Sequence
  Synthetic: FXN 5 forward 9:69036111-69036134; AsCpf1-1
ttctctggttctcccggtt

SEQ ID NO: 47263 - DNA, 20 bp, Artificial Sequence
  Synthetic: FXN 5 forward 9:69036111-69036135; AsCpf1-1
ttctctggttctcccggttg

SEQ ID NO: 47264 - DNA, 21 bp, Artificial Sequence
  Synthetic: FXN 5 forward 9:69036111-69036136; AsCpf1-1
ttctctggttctcccggttgc

SEQ ID NO: 47265 - DNA, 22 bp, Artificial Sequence
  Synthetic: FXN 5 forward 9:69036111-69036137; AsCpf1-1
ttctctggttctcccggttgca

SEQ ID NO: 47266 - DNA, 23 bp, Artificial Sequence
  Synthetic: FXN 5 forward 9:69036111-69036138; AsCpf1-1
ttctctggttctcccggttgcat

SEQ ID NO: 47267 - DNA, 24 bp, Artificial Sequence
  Synthetic: FXN 5 forward 9:69036111-69036139; AsCpf1-1
ttctctggttctcccggttgcatt

SEQ ID NO: 47268 - DNA, 25 bp, Artificial Sequence
  Synthetic: FXN 5 forward 9:69036111-69036140; AsCpf1-1
ttctctggttctcccggttgcattt

SEQ ID NO: 47269 - DNA, 18 bp, Artificial Sequence
  Synthetic: FXN 5 forward 9:69036126-69036148; AsCpf1-1
ggttgcatttacactggc

SEQ ID NO: 47270 - DNA, 19 bp, Artificial Sequence
  Synthetic: FXN 5 forward 9:69036126-69036149; AsCpf1-1
ggttgcatttacactggct

SEQ ID NO: 47271 - DNA, 20 bp, Artificial Sequence
  Synthetic: FXN 5 forward 9:69036126-69036150; AsCpf1-1
ggttgcatttacactggctt

SEQ ID NO: 47272 - DNA, 21 bp, Artificial Sequence
  Synthetic: FXN 5 forward 9:69036126-69036151; AsCpf1-1
ggttgcatttacactggcttc

SEQ ID NO: 47273 - DNA, 22 bp, Artificial Sequence
  Synthetic: FXN 5 forward 9:69036126-69036152; AsCpf1-1
ggttgcatttacactggcttct

SEQ ID NO: 47274 - DNA, 23 bp, Artificial Sequence
  Synthetic: FXN 5 forward 9:69036126-69036153; AsCpf1-1
ggttgcatttacactggcttctg

SEQ ID NO: 47275 - DNA, 24 bp, Artificial Sequence
  Synthetic: FXN 5 forward 9:69036126-69036154; AsCpf1-1
ggttgcatttacactggcttctgc

SEQ ID NO: 47276 - DNA, 25 bp, Artificial Sequence
  Synthetic: FXN 5 forward 9:69036126-69036155; AsCpf1-1
ggttgcatttacactggcttctgct

SEQ ID NO: 47277 - DNA, 18 bp, Artificial Sequence
  Synthetic: FXN 5 reverse 9:69036133-69036155; AsCpf1-1
gaaagcagaagccagtgt

SEQ ID NO: 47278 - DNA, 19 bp, Artificial Sequence
  Synthetic: FXN 5 reverse 9:69036133-69036156; AsCpf1-1
gaaagcagaagccagtgta

SEQ ID NO: 47279 - DNA, 20 bp, Artificial Sequence
  Synthetic: FXN 5 reverse 9:69036133-69036157; AsCpf1-1
gaaagcagaagccagtgtaa

SEQ ID NO: 47280 - DNA, 21 bp, Artificial Sequence
  Synthetic: FXN 5 reverse 9:69036133-69036158; AsCpf1-1
gaaagcagaagccagtgtaaa

SEQ ID NO: 47281 - DNA, 22 bp, Artificial Sequence
  Synthetic: FXN 5 reverse 9:69036133-69036159; AsCpf1-1
gaaagcagaagccagtgtaaat

SEQ ID NO: 47282 - DNA, 23 bp, Artificial Sequence
  Synthetic: FXN 5 reverse 9:69036133-69036160; AsCpf1-1
gaaagcagaagccagtgtaaatg

SEQ ID NO: 47283 - DNA, 24 bp, Artificial Sequence
  Synthetic: FXN 5 reverse 9:69036133-69036161; AsCpf1-1
gaaagcagaagccagtgtaaatgc

SEQ ID NO: 47284 - DNA, 25 bp, Artificial Sequence
  Synthetic: FXN 5 reverse 9:69036133-69036162; AsCpf1-1
gaaagcagaagccagtgtaaatgca

SEQ ID NO: 47285 - DNA, 18 bp, Artificial Sequence
  Synthetic: FXN 5 reverse 9:69036137-69036159; AsCpf1-1
ttcggaaagcagaagcca

SEQ ID NO: 47286 - DNA, 19 bp, Artificial Sequence
  Synthetic: FXN 5 reverse 9:69036137-69036160; AsCpf1-1
ttcggaaagcagaagccag

SEQ ID NO: 47287 - DNA, 20 bp, Artificial Sequence
  Synthetic: FXN 5 reverse 9:69036137-69036161; AsCpf1-1
ttcggaaagcagaagccagt

SEQ ID NO: 47288 - DNA, 21 bp, Artificial Sequence
  Synthetic: FXN 5 reverse 9:69036137-69036162; AsCpf1-1
ttcggaaagcagaagccagtg

SEQ ID NO: 47289 - DNA, 22 bp, Artificial Sequence
  Synthetic: FXN 5 reverse 9:69036137-69036163; AsCpf1-1
ttcggaaagcagaagccagtgt

SEQ ID NO: 47290 - DNA, 23 bp, Artificial Sequence
  Synthetic: FXN 5 reverse 9:69036137-69036164; AsCpf1-1
ttcggaaagcagaagccagtgta

SEQ ID NO: 47291 - DNA, 24 bp, Artificial Sequence
  Synthetic: FXN 5 reverse 9:69036137-69036165; AsCpf1-1
ttcggaaagcagaagccagtgtaa

SEQ ID NO: 47292 - DNA, 25 bp, Artificial Sequence
  Synthetic: FXN 5 reverse 9:69036137-69036166; AsCpf1-1
ttcggaaagcagaagccagtgtaaa

SEQ ID NO: 47293 - DNA, 18 bp, Artificial Sequence
  Synthetic: FXN 5 reverse 9:69036144-69036166; AsCpf1-1
cttttccttcggaaagca

SEQ ID NO: 47294 - DNA, 19 bp, Artificial Sequence
  Synthetic: FXN 5 reverse 9:69036144-69036167; AsCpf1-1
cttttccttcggaaagcag

SEQ ID NO: 47295 - DNA, 20 bp, Artificial Sequence
  Synthetic: FXN 5 reverse 9:69036144-69036168; AsCpf1-1
cttttccttcggaaagcaga

SEQ ID NO: 47296 - DNA, 21 bp, Artificial Sequence
  Synthetic: FXN 5 reverse 9:69036144-69036169; AsCpf1-1
cttttccttcggaaagcagaa

SEQ ID NO: 47297 - DNA, 22 bp, Artificial Sequence
  Synthetic: FXN 5 reverse 9:69036144-69036170; AsCpf1-1
cttttccttcggaaagcagaag

SEQ ID NO: 47298 - DNA, 23 bp, Artificial Sequence
  Synthetic: FXN 5 reverse 9:69036144-69036171; AsCpf1-1
cttttccttcggaaagcagaagc

SEQ ID NO: 47299 - DNA, 24 bp, Artificial Sequence
  Synthetic: FXN 5 reverse 9:69036144-69036172; AsCpf1-1
cttttccttcggaaagcagaagcc

SEQ ID NO: 47300 - DNA, 25 bp, Artificial Sequence
  Synthetic: FXN 5 reverse 9:69036144-69036173; AsCpf1-1
cttttccttcggaaagcagaagcca

SEQ ID NO: 47301 - DNA, 18 bp, Artificial Sequence
  Synthetic: FXN 5 forward 9:69036155-69036177; AsCpf1-1
gaaggaaaaggggacatt

SEQ ID NO: 47302 - DNA, 19 bp, Artificial Sequence
  Synthetic: FXN 5 forward 9:69036155-69036178; AsCpf1-1
gaaggaaaaggggacattt

SEQ ID NO: 47303 - DNA, 20 bp, Artificial Sequence
  Synthetic: FXN 5 forward 9:69036155-69036179; AsCpf1-1
gaaggaaaaggggacatttt

SEQ ID NO: 47304 - DNA, 21 bp, Artificial Sequence
  Synthetic: FXN 5 forward 9:69036155-69036180; AsCpf1-1
gaaggaaaaggggacattttg

SEQ ID NO: 47305 - DNA, 22 bp, Artificial Sequence
  Synthetic: FXN 5 forward 9:69036155-69036181; AsCpf1-1
gaaggaaaaggggacattttgt

SEQ ID NO: 47306 - DNA, 23 bp, Artificial Sequence
  Synthetic: FXN 5 forward 9:69036155-69036182; AsCpf1-1
gaaggaaaaggggacattttgtc

SEQ ID NO: 47307 - DNA, 24 bp, Artificial Sequence
  Synthetic: FXN 5 forward 9:69036155-69036183; AsCpf1-1
gaaggaaaaggggacattttgtcc

SEQ ID NO: 47308 - DNA, 25 bp, Artificial Sequence
  Synthetic: FXN 5 forward 9:69036155-69036184; AsCpf1-1
gaaggaaaaggggacattttgtcct

SEQ ID NO: 47309 - DNA, 18 bp, Artificial Sequence
  Synthetic: FXN 5 forward 9:69036156-69036178; AsCpf1-1
aaggaaaaggggacattt

SEQ ID NO: 47310 - DNA, 19 bp, Artificial Sequence
  Synthetic: FXN 5 forward 9:69036156-69036179; AsCpf1-1
aaggaaaaggggacatttt

SEQ ID NO: 47311 - DNA, 20 bp, Artificial Sequence
  Synthetic: FXN 5 forward 9:69036156-69036180; AsCpf1-1
aaggaaaaggggacattttg

SEQ ID NO: 47312 - DNA, 21 bp, Artificial Sequence
  Synthetic: FXN 5 forward 9:69036156-69036181; AsCpf1-1
aaggaaaaggggacattttgt

SEQ ID NO: 47313 - DNA, 22 bp, Artificial Sequence
  Synthetic: FXN 5 forward 9:69036156-69036182; AsCpf1-1
aaggaaaaggggacattttgtc

SEQ ID NO: 47314 - DNA, 23 bp, Artificial Sequence
  Synthetic: FXN 5 forward 9:69036156-69036183; AsCpf1-1
aaggaaaaggggacattttgtcc

SEQ ID NO: 47315 - DNA, 24 bp, Artificial Sequence
  Synthetic: FXN 5 forward 9:69036156-69036184; AsCpf1-1
aaggaaaaggggacattttgtcct

SEQ ID NO: 47316 - DNA, 25 bp, Artificial Sequence
  Synthetic: FXN 5 forward 9:69036156-69036185; AsCpf1-1
aaggaaaaggggacattttgtcctg

SEQ ID NO: 47317 - DNA, 18 bp, Artificial Sequence
  Synthetic: FXN 5 reverse 9:69036187-69036209; AsCpf1-1
cccgtgccttgacccgca

SEQ ID NO: 47318 - DNA, 19 bp, Artificial Sequence
  Synthetic: FXN 5 reverse 9:69036187-69036210; AsCpf1-1
cccgtgccttgacccgcag

SEQ ID NO: 47319 - DNA, 20 bp, Artificial Sequence
  Synthetic: FXN 5 reverse 9:69036187-69036211; AsCpf1-1
cccgtgccttgacccgcagt

SEQ ID NO: 47320 - DNA, 21 bp, Artificial Sequence
  Synthetic: FXN 5 reverse 9:69036187-69036212; AsCpf1-1
cccgtgccttgacccgcagtc

SEQ ID NO: 47321 - DNA, 22 bp, Artificial Sequence
  Synthetic: FXN 5 reverse 9:69036187-69036213; AsCpf1-1
cccgtgccttgacccgcagtcg

SEQ ID NO: 47322 - DNA, 23 bp, Artificial Sequence
  Synthetic: FXN 5 reverse 9:69036187-69036214; AsCpf1-1
cccgtgccttgacccgcagtcgc

SEQ ID NO: 47323 - DNA, 24 bp, Artificial Sequence
  Synthetic: FXN 5 reverse 9:69036187-69036215; AsCpf1-1
cccgtgccttgacccgcagtcgca

SEQ ID NO: 47324 - DNA, 25 bp, Artificial Sequence
  Synthetic: FXN 5 reverse 9:69036187-69036216; AsCpf1-1
cccgtgccttgacccgcagtcgcac

SEQ ID NO: 47325 - DNA, 18 bp, Artificial Sequence
  Synthetic: FXN 5 reverse 9:69036206-69036228; AsCpf1-1
ccagcctgccctgccttc

SEQ ID NO: 47326 - DNA, 19 bp, Artificial Sequence
  Synthetic: FXN 5 reverse 9:69036206-69036229; AsCpf1-1
ccagcctgccctgccttcg

SEQ ID NO: 47327 - DNA, 20 bp, Artificial Sequence
  Synthetic: FXN 5 reverse 9:69036206-69036230; AsCpf1-1
ccagcctgccctgccttcgc

SEQ ID NO: 47328 - DNA, 21 bp, Artificial Sequence
  Synthetic: FXN 5 reverse 9:69036206-69036231; AsCpf1-1
ccagcctgccctgccttcgcc

SEQ ID NO: 47329 - DNA, 22 bp, Artificial Sequence
  Synthetic: FXN 5 reverse 9:69036206-69036232; AsCpf1-1
ccagcctgccctgccttcgccc

SEQ ID NO: 47330 - DNA, 23 bp, Artificial Sequence
  Synthetic: FXN 5 reverse 9:69036206-69036233; AsCpf1-1
ccagcctgccctgccttcgcccg

SEQ ID NO: 47331 - DNA, 24 bp, Artificial Sequence
  Synthetic: FXN 5 reverse 9:69036206-69036234; AsCpf1-1
ccagcctgccctgccttcgcccgt

SEQ ID NO: 47332 - DNA, 25 bp, Artificial Sequence
  Synthetic: FXN 5 reverse 9:69036206-69036235; AsCpf1-1
ccagcctgccctgccttcgcccgtg

SEQ ID NO: 47333 - DNA, 18 bp, Artificial Sequence
  Synthetic: FXN 5 reverse 9:69036211-69036233; AsCpf1-1
ctccaccagcctgccctg

SEQ ID NO: 47334 - DNA, 19 bp, Artificial Sequence
  Synthetic: FXN 5 reverse 9:69036211-69036234; AsCpf1-1
ctccaccagcctgccctgc

SEQ ID NO: 47335 - DNA, 20 bp, Artificial Sequence
  Synthetic: FXN 5 reverse 9:69036211-69036235; AsCpf1-1
ctccaccagcctgccctgcc

SEQ ID NO: 47336 - DNA, 21 bp, Artificial Sequence
  Synthetic: FXN 5 reverse 9:69036211-69036236; AsCpf1-1
ctccaccagcctgccctgcct

SEQ ID NO: 47337 - DNA, 22 bp, Artificial Sequence
  Synthetic: FXN 5 reverse 9:69036211-69036237; AsCpf1-1
ctccaccagcctgccctgcctt

SEQ ID NO: 47338 - DNA, 23 bp, Artificial Sequence
  Synthetic: FXN 5 reverse 9:69036211-69036238; AsCpf1-1
ctccaccagcctgccctgccttc

SEQ ID NO: 47339 - DNA, 24 bp, Artificial Sequence
  Synthetic: FXN 5 reverse 9:69036211-69036239; AsCpf1-1
ctccaccagcctgccctgccttcg

SEQ ID NO: 47340 - DNA, 25 bp, Artificial Sequence
  Synthetic: FXN 5 reverse 9:69036211-69036240; AsCpf1-1
ctccaccagcctgccctgccttcgc

SEQ ID NO: 47341 - DNA, 18 bp, Artificial Sequence
  Synthetic: FXN 5 forward 9:69036244-69036266; AsCpf1-1
gaggggtgtgcggctgtc

SEQ ID NO: 47342 - DNA, 19 bp, Artificial Sequence
  Synthetic: FXN 5 forward 9:69036244-69036267; AsCpf1-1
gaggggtgtgcggctgtct

SEQ ID NO: 47343 - DNA, 20 bp, Artificial Sequence
  Synthetic: FXN 5 forward 9:69036244-69036268; AsCpf1-1
gaggggtgtgcggctgtctc

SEQ ID NO: 47344 - DNA, 21 bp, Artificial Sequence
  Synthetic: FXN 5 forward 9:69036244-69036269; AsCpf1-1
gaggggtgtgcggctgtctcc

SEQ ID NO: 47345 - DNA, 22 bp, Artificial Sequence
  Synthetic: FXN 5 forward 9:69036244-69036270; AsCpf1-1
gaggggtgtgcggctgtctcca

SEQ ID NO: 47346 - DNA, 23 bp, Artificial Sequence
  Synthetic: FXN 5 forward 9:69036244-69036271; AsCpf1-1
gaggggtgtgcggctgtctccat

SEQ ID NO: 47347 - DNA, 24 bp, Artificial Sequence
  Synthetic: FXN 5 forward 9:69036244-69036272; AsCpf1-1
gaggggtgtgcggctgtctccatg

SEQ ID NO: 47348 - DNA, 25 bp, Artificial Sequence
  Synthetic: FXN 5 forward 9:69036244-69036273; AsCpf1-1
gaggggtgtgcggctgtctccatgc

SEQ ID NO: 47349 - DNA, 18 bp, Artificial Sequence
  Synthetic: FXN 5 forward 9:69036245-69036267; AsCpf1-1
aggggtgtgcggctgtct

SEQ ID NO: 47350 - DNA, 19 bp, Artificial Sequence
  Synthetic: FXN 5 forward 9:69036245-69036268; AsCpf1-1
aggggtgtgcggctgtctc

SEQ ID NO: 47351 - DNA, 20 bp, Artificial Sequence
  Synthetic: FXN 5 forward 9:69036245-69036269; AsCpf1-1
aggggtgtgcggctgtctcc

SEQ ID NO: 47352 - DNA, 21 bp, Artificial Sequence
  Synthetic: FXN 5 forward 9:69036245-69036270; AsCpf1-1
aggggtgtgcggctgtctcca

SEQ ID NO: 47353 - DNA, 22 bp, Artificial Sequence
  Synthetic: FXN 5 forward 9:69036245-69036271; AsCpf1-1
aggggtgtgcggctgtctccat

SEQ ID NO: 47354 - DNA, 23 bp, Artificial Sequence
  Synthetic: FXN 5 forward 9:69036245-69036272; AsCpf1-1
aggggtgtgcggctgtctccatg

SEQ ID NO: 47355 - DNA, 24 bp, Artificial Sequence
  Synthetic: FXN 5 forward 9:69036245-69036273; AsCpf1-1
aggggtgtgcggctgtctccatgc

SEQ ID NO: 47356 - DNA, 25 bp, Artificial Sequence
  Synthetic: FXN 5 forward 9:69036245-69036274; AsCpf1-1
aggggtgtgcggctgtctccatgct

SEQ ID NO: 47357 - DNA, 18 bp, Artificial Sequence
  Synthetic: FXN 5 forward 9:69036266-69036288; AsCpf1-1
tgcttgtcacttctctgc

SEQ ID NO: 47358 - DNA, 19 bp, Artificial Sequence
  Synthetic: FXN 5 forward 9:69036266-69036289; AsCpf1-1
tgcttgtcacttctctgcg

SEQ ID NO: 47359 - DNA, 20 bp, Artificial Sequence
  Synthetic: FXN 5 forward 9:69036266-69036290; AsCpf1-1
tgcttgtcacttctctgcga

SEQ ID NO: 47360 - DNA, 21 bp, Artificial Sequence
  Synthetic: FXN 5 forward 9:69036266-69036291; AsCpf1-1
tgcttgtcacttctctgcgat

SEQ ID NO: 47361 - DNA, 22 bp, Artificial Sequence
  Synthetic: FXN 5 forward 9:69036266-69036292; AsCpf1-1
tgcttgtcacttctctgcgata

SEQ ID NO: 47362 - DNA, 23 bp, Artificial Sequence
  Synthetic: FXN 5 forward 9:69036266-69036293; AsCpf1-1
tgcttgtcacttctctgcgataa

SEQ ID NO: 47363 - DNA, 24 bp, Artificial Sequence
  Synthetic: FXN 5 forward 9:69036266-69036294; AsCpf1-1
tgcttgtcacttctctgcgataac

SEQ ID NO: 47364 - DNA, 25 bp, Artificial Sequence
  Synthetic: FXN 5 forward 9:69036266-69036295; AsCpf1-1
tgcttgtcacttctctgcgataact

SEQ ID NO: 47365 - DNA, 18 bp, Artificial Sequence
  Synthetic: FXN 5 forward 9:69036298-69036320; AsCpf1-1
gtaatattaatagatggt

SEQ ID NO: 47366 - DNA, 19 bp, Artificial Sequence
  Synthetic: FXN 5 forward 9:69036298-69036321; AsCpf1-1
gtaatattaatagatggta

SEQ ID NO: 47367 - DNA, 20 bp, Artificial Sequence
  Synthetic: FXN 5 forward 9:69036298-69036322; AsCpf1-1
gtaatattaatagatggtat

SEQ ID NO: 47368 - DNA, 21 bp, Artificial Sequence
  Synthetic: FXN 5 forward 9:69036298-69036323; AsCpf1-1
gtaatattaatagatggtatc

SEQ ID NO: 47369 - DNA, 22 bp, Artificial Sequence
  Synthetic: FXN 5 forward 9:69036298-69036324; AsCpf1-1
gtaatattaatagatggtatct

SEQ ID NO: 47370 - DNA, 23 bp, Artificial Sequence
  Synthetic: FXN 5 forward 9:69036298-69036325; AsCpf1-1
gtaatattaatagatggtatctg

SEQ ID NO: 47371 - DNA, 24 bp, Artificial Sequence
  Synthetic: FXN 5 forward 9:69036298-69036326; AsCpf1-1
gtaatattaatagatggtatctgc

SEQ ID NO: 47372 - DNA, 25 bp, Artificial Sequence
  Synthetic: FXN 5 forward 9:69036298-69036327; AsCpf1-1
gtaatattaatagatggtatctgct

SEQ ID NO: 47373 - DNA, 18 bp, Artificial Sequence
  Synthetic: FXN 5 reverse 9:69036412-69036434; AsCpf1-1
gccttgaaaatattaggt

SEQ ID NO: 47374 - DNA, 19 bp, Artificial Sequence
  Synthetic: FXN 5 reverse 9:69036412-69036435; AsCpf1-1
gccttgaaaatattaggtg

SEQ ID NO: 47375 - DNA, 20 bp, Artificial Sequence
  Synthetic: FXN 5 reverse 9:69036412-69036436; AsCpf1-1
gccttgaaaatattaggtgt

SEQ ID NO: 47376 - DNA, 21 bp, Artificial Sequence
  Synthetic: FXN 5 reverse 9:69036412-69036437; AsCpf1-1
gccttgaaaatattaggtgtg

SEQ ID NO: 47377 - DNA, 22 bp, Artificial Sequence
  Synthetic: FXN 5 reverse 9:69036412-69036438; AsCpf1-1
gccttgaaaatattaggtgtgc

SEQ ID NO: 47378 - DNA, 23 bp, Artificial Sequence
  Synthetic: FXN 5 reverse 9:69036412-69036439; AsCpf1-1
gccttgaaaatattaggtgtgcg

SEQ ID NO: 47379 - DNA, 24 bp, Artificial Sequence
  Synthetic: FXN 5 reverse 9:69036412-69036440; AsCpf1-1
gccttgaaaatattaggtgtgcgc

SEQ ID NO: 47380 - DNA, 25 bp, Artificial Sequence
  Synthetic: FXN 5 reverse 9:69036412-69036441; AsCpf1-1
gccttgaaaatattaggtgtgcgcg

SEQ ID NO: 47381 - DNA, 18 bp, Artificial Sequence
  Synthetic: FXN 5 reverse 9:69036422-69036444; AsCpf1-1
aaaaaatccagccttgaa

SEQ ID NO: 47382 - DNA, 19 bp, Artificial Sequence
  Synthetic: FXN 5 reverse 9:69036422-69036445; AsCpf1-1
aaaaaatccagccttgaaa

SEQ ID NO: 47383 - DNA, 20 bp, Artificial Sequence
  Synthetic: FXN 5 reverse 9:69036422-69036446; AsCpf1-1
aaaaaatccagccttgaaaa

SEQ ID NO: 47384 - DNA, 21 bp, Artificial Sequence
  Synthetic: FXN 5 reverse 9:69036422-69036447; AsCpf1-1
aaaaaatccagccttgaaaat

SEQ ID NO: 47385 - DNA, 22 bp, Artificial Sequence
  Synthetic: FXN 5 reverse 9:69036422-69036448; AsCpf1-1
aaaaaatccagccttgaaaata

SEQ ID NO: 47386 - DNA, 23 bp, Artificial Sequence
  Synthetic: FXN 5 reverse 9:69036422-69036449; AsCpf1-1
aaaaaatccagccttgaaaatat

SEQ ID NO: 47387 - DNA, 24 bp, Artificial Sequence
  Synthetic: FXN 5 reverse 9:69036422-69036450; AsCpf1-1
aaaaaatccagccttgaaaatatt

SEQ ID NO: 47388 - DNA, 25 bp, Artificial Sequence
  Synthetic: FXN 5 reverse 9:69036422-69036451; AsCpf1-1
aaaaaatccagccttgaaaatatta

SEQ ID NO: 47389 - DNA, 18 bp, Artificial Sequence
  Synthetic: FXN 5 reverse 9:69036426-69036448; AsCpf1-1
ttcaaaaaaatccagcct

SEQ ID NO: 47390 - DNA, 19 bp, Artificial Sequence
  Synthetic: FXN 5 reverse 9:69036426-69036449; AsCpf1-1
ttcaaaaaaatccagcctt

SEQ ID NO: 47391 - DNA, 20 bp, Artificial Sequence
  Synthetic: FXN 5 reverse 9:69036426-69036450; AsCpf1-1
ttcaaaaaaatccagccttg

SEQ ID NO: 47392 - DNA, 21 bp, Artificial Sequence
  Synthetic: FXN 5 reverse 9:69036426-69036451; AsCpf1-1
ttcaaaaaaatccagccttga

SEQ ID NO: 47393 - DNA, 22 bp, Artificial Sequence
  Synthetic: FXN 5 reverse 9:69036426-69036452; AsCpf1-1
ttcaaaaaaatccagccttgaa

SEQ ID NO: 47394 - DNA, 23 bp, Artificial Sequence
  Synthetic: FXN 5 reverse 9:69036426-69036453; AsCpf1-1
ttcaaaaaaatccagccttgaaa

SEQ ID NO: 47395 - DNA, 24 bp, Artificial Sequence
  Synthetic: FXN 5 reverse 9:69036426-69036454; AsCpf1-1
ttcaaaaaaatccagccttgaaaa

SEQ ID NO: 47396 - DNA, 25 bp, Artificial Sequence
  Synthetic: FXN 5 reverse 9:69036426-69036455; AsCpf1-1
ttcaaaaaaatccagccttgaaaat

SEQ ID NO: 47397 - DNA, 18 bp, Artificial Sequence
  Synthetic: FXN 5 forward 9:69036429-69036451; AsCpf1-1
aggctggatttttttgaa

SEQ ID NO: 47398 - DNA, 19 bp, Artificial Sequence
  Synthetic: FXN 5 forward 9:69036429-69036452; AsCpf1-1
aggctggatttttttgaac

SEQ ID NO: 47399 - DNA, 20 bp, Artificial Sequence
  Synthetic: FXN 5 forward 9:69036429-69036453; AsCpf1-1
aggctggatttttttgaacg

SEQ ID NO: 47400 - DNA, 21 bp, Artificial Sequence
  Synthetic: FXN 5 forward 9:69036429-69036454; AsCpf1-1
aggctggatttttttgaacga

SEQ ID NO: 47401 - DNA, 22 bp, Artificial Sequence
  Synthetic: FXN 5 forward 9:69036429-69036455; AsCpf1-1
aggctggatttttttgaacgaa

SEQ ID NO: 47402 - DNA, 23 bp, Artificial Sequence
  Synthetic: FXN 5 forward 9:69036429-69036456; AsCpf1-1
aggctggatttttttgaacgaaa

SEQ ID NO: 47403 - DNA, 24 bp, Artificial Sequence
  Synthetic: FXN 5 forward 9:69036429-69036457; AsCpf1-1
aggctggatttttttgaacgaaat

SEQ ID NO: 47404 - DNA, 25 bp, Artificial Sequence
  Synthetic: FXN 5 forward 9:69036429-69036458; AsCpf1-1
aggctggatttttttgaacgaaatg

SEQ ID NO: 47405 - DNA, 18 bp, Artificial Sequence
  Synthetic: FXN 5 reverse 9:69036439-69036461; AsCpf1-1
ggaaagcatttcgttcaa

SEQ ID NO: 47406 - DNA, 19 bp, Artificial Sequence
  Synthetic: FXN 5 reverse 9:69036439-69036462; AsCpf1-1
ggaaagcatttcgttcaaa

SEQ ID NO: 47407 - DNA, 20 bp, Artificial Sequence
  Synthetic: FXN 5 reverse 9:69036439-69036463; AsCpf1-1
ggaaagcatttcgttcaaaa

SEQ ID NO: 47408 - DNA, 21 bp, Artificial Sequence
  Synthetic: FXN 5 reverse 9:69036439-69036464; AsCpf1-1
ggaaagcatttcgttcaaaaa

SEQ ID NO: 47409 - DNA, 22 bp, Artificial Sequence
  Synthetic: FXN 5 reverse 9:69036439-69036465; AsCpf1-1
ggaaagcatttcgttcaaaaaa

SEQ ID NO: 47410 - DNA, 23 bp, Artificial Sequence
  Synthetic: FXN 5 reverse 9:69036439-69036466; AsCpf1-1
ggaaagcatttcgttcaaaaaaa

SEQ ID NO: 47411 - DNA, 24 bp, Artificial Sequence
  Synthetic: FXN 5 reverse 9:69036439-69036467; AsCpf1-1
ggaaagcatttcgttcaaaaaaat

SEQ ID NO: 47412 - DNA, 25 bp, Artificial Sequence
  Synthetic: FXN 5 reverse 9:69036439-69036468; AsCpf1-1
ggaaagcatttcgttcaaaaaaatc

SEQ ID NO: 47413 - DNA, 18 bp, Artificial Sequence
  Synthetic: FXN 5 reverse 9:69036440-69036462; AsCpf1-1
aggaaagcatttcgttca

SEQ ID NO: 47414 - DNA, 19 bp, Artificial Sequence
  Synthetic: FXN 5 reverse 9:69036440-69036463; AsCpf1-1
aggaaagcatttcgttcaa

SEQ ID NO: 47415 - DNA, 20 bp, Artificial Sequence
  Synthetic: FXN 5 reverse 9:69036440-69036464; AsCpf1-1
aggaaagcatttcgttcaaa

SEQ ID NO: 47416 - DNA, 21 bp, Artificial Sequence
  Synthetic: FXN 5 reverse 9:69036440-69036465; AsCpf1-1
aggaaagcatttcgttcaaaa

SEQ ID NO: 47417 - DNA, 22 bp, Artificial Sequence
  Synthetic: FXN 5 reverse 9:69036440-69036466; AsCpf1-1
aggaaagcatttcgttcaaaaa

SEQ ID NO: 47418 - DNA, 23 bp, Artificial Sequence
  Synthetic: FXN 5 reverse 9:69036440-69036467; AsCpf1-1
aggaaagcatttcgttcaaaaaa

SEQ ID NO: 47419 - DNA, 24 bp, Artificial Sequence
  Synthetic: FXN 5 reverse 9:69036440-69036468; AsCpf1-1
aggaaagcatttcgttcaaaaaaa

SEQ ID NO: 47420 - DNA, 25 bp, Artificial Sequence
  Synthetic: FXN 5 reverse 9:69036440-69036469; AsCpf1-1
aggaaagcatttcgttcaaaaaaat

SEQ ID NO: 47421 - DNA, 18 bp, Artificial Sequence
  Synthetic: FXN 5 reverse 9:69036449-69036471; AsCpf1-1
cctcgttccaggaaagca

SEQ ID NO: 47422 - DNA, 19 bp, Artificial Sequence
  Synthetic: FXN 5 reverse 9:69036449-69036472; AsCpf1-1
cctcgttccaggaaagcat

SEQ ID NO: 47423 - DNA, 20 bp, Artificial Sequence
  Synthetic: FXN 5 reverse 9:69036449-69036473; AsCpf1-1
cctcgttccaggaaagcatt

SEQ ID NO: 47424 - DNA, 21 bp, Artificial Sequence
  Synthetic: FXN 5 reverse 9:69036449-69036474; AsCpf1-1
cctcgttccaggaaagcattt

SEQ ID NO: 47425 - DNA, 22 bp, Artificial Sequence
  Synthetic: FXN 5 reverse 9:69036449-69036475; AsCpf1-1
cctcgttccaggaaagcatttc

SEQ ID NO: 47426 - DNA, 23 bp, Artificial Sequence
  Synthetic: FXN 5 reverse 9:69036449-69036476; AsCpf1-1
cctcgttccaggaaagcatttcg

SEQ ID NO: 47427 - DNA, 24 bp, Artificial Sequence
  Synthetic: FXN 5 reverse 9:69036449-69036477; AsCpf1-1
cctcgttccaggaaagcatttcgt

SEQ ID NO: 47428 - DNA, 25 bp, Artificial Sequence
  Synthetic: FXN 5 reverse 9:69036449-69036478; AsCpf1-1
cctcgttccaggaaagcatttcgtt

SEQ ID NO: 47429 - DNA, 18 bp, Artificial Sequence
  Synthetic: FXN 5 forward 9:69036460-69036482; AsCpf1-1
tggaacgaggtgaaactt

SEQ ID NO: 47430 - DNA, 19 bp, Artificial Sequence
  Synthetic: FXN 5 forward 9:69036460-69036483; AsCpf1-1
tggaacgaggtgaaacttt

SEQ ID NO: 47431 - DNA, 20 bp, Artificial Sequence
  Synthetic: FXN 5 forward 9:69036460-69036484; AsCpf1-1
tggaacgaggtgaaactttc

SEQ ID NO: 47432 - DNA, 21 bp, Artificial Sequence
  Synthetic: FXN 5 forward 9:69036460-69036485; AsCpf1-1
tggaacgaggtgaaactttca

SEQ ID NO: 47433 - DNA, 22 bp, Artificial Sequence
  Synthetic: FXN 5 forward 9:69036460-69036486; AsCpf1-1
tggaacgaggtgaaactttcag

SEQ ID NO: 47434 - DNA, 23 bp, Artificial Sequence
  Synthetic: FXN 5 forward 9:69036460-69036487; AsCpf1-1
tggaacgaggtgaaactttcaga

SEQ ID NO: 47435 - DNA, 24 bp, Artificial Sequence
  Synthetic: FXN 5 forward 9:69036460-69036488; AsCpf1-1
tggaacgaggtgaaactttcagag

SEQ ID NO: 47436 - DNA, 25 bp, Artificial Sequence
  Synthetic: FXN 5 forward 9:69036460-69036489; AsCpf1-1
tggaacgaggtgaaactttcagagc

SEQ ID NO: 47437 - DNA, 18 bp, Artificial Sequence
  Synthetic: FXN 5 forward 9:69036481-69036503; AsCpf1-1
gagctgcagaatagctag

SEQ ID NO: 47438 - DNA, 19 bp, Artificial Sequence
  Synthetic: FXN 5 forward 9:69036481-69036504; AsCpf1-1
gagctgcagaatagctaga

SEQ ID NO: 47439 - DNA, 20 bp, Artificial Sequence
  Synthetic: FXN 5 forward 9:69036481-69036505; AsCpf1-1
gagctgcagaatagctagag

SEQ ID NO: 47440 - DNA, 21 bp, Artificial Sequence
  Synthetic: FXN 5 forward 9:69036481-69036506; AsCpf1-1
gagctgcagaatagctagagc

SEQ ID NO: 47441 - DNA, 22 bp, Artificial Sequence
  Synthetic: FXN 5 forward 9:69036481-69036507; AsCpf1-1
gagctgcagaatagctagagca

SEQ ID NO: 47442 - DNA, 23 bp, Artificial Sequence
  Synthetic: FXN 5 forward 9:69036481-69036508; AsCpf1-1
gagctgcagaatagctagagcag

SEQ ID NO: 47443 - DNA, 24 bp, Artificial Sequence
  Synthetic: FXN 5 forward 9:69036481-69036509; AsCpf1-1
gagctgcagaatagctagagcagc

SEQ ID NO: 47444 - DNA, 25 bp, Artificial Sequence
  Synthetic: FXN 5 forward 9:69036481-69036510; AsCpf1-1
gagctgcagaatagctagagcagca

SEQ ID NO: 47445 - DNA, 18 bp, Artificial Sequence
  Synthetic: FXN 5 reverse 9:69036499-69036521; AsCpf1-1
aaagccagggcccctgct

SEQ ID NO: 47446 - DNA, 19 bp, Artificial Sequence
  Synthetic: FXN 5 reverse 9:69036499-69036522; AsCpf1-1
aaagccagggcccctgctg

SEQ ID NO: 47447 - DNA, 20 bp, Artificial Sequence
  Synthetic: FXN 5 reverse 9:69036499-69036523; AsCpf1-1
aaagccagggcccctgctgc

SEQ ID NO: 47448 - DNA, 21 bp, Artificial Sequence
  Synthetic: FXN 5 reverse 9:69036499-69036524; AsCpf1-1
aaagccagggcccctgctgct

SEQ ID NO: 47449 - DNA, 22 bp, Artificial Sequence
  Synthetic: FXN 5 reverse 9:69036499-69036525; AsCpf1-1
aaagccagggcccctgctgctc

SEQ ID NO: 47450 - DNA, 23 bp, Artificial Sequence
  Synthetic: FXN 5 reverse 9:69036499-69036526; AsCpf1-1
aaagccagggcccctgctgctct

SEQ ID NO: 47451 - DNA, 24 bp, Artificial Sequence
  Synthetic: FXN 5 reverse 9:69036499-69036527; AsCpf1-1
aaagccagggcccctgctgctcta

SEQ ID NO: 47452 - DNA, 25 bp, Artificial Sequence
  Synthetic: FXN 5 reverse 9:69036499-69036528; AsCpf1-1
aaagccagggcccctgctgctctag

SEQ ID NO: 47453 - DNA, 18 bp, Artificial Sequence
  Synthetic: FXN 5 reverse 9:69036500-69036522; AsCpf1-1
aaaagccagggcccctgc

SEQ ID NO: 47454 - DNA, 19 bp, Artificial Sequence
  Synthetic: FXN 5 reverse 9:69036500-69036523; AsCpf1-1
aaaagccagggcccctgct

SEQ ID NO: 47455 - DNA, 20 bp, Artificial Sequence
  Synthetic: FXN 5 reverse 9:69036500-69036524; AsCpf1-1
aaaagccagggcccctgctg

SEQ ID NO: 47456 - DNA, 21 bp, Artificial Sequence
  Synthetic: FXN 5 reverse 9:69036500-69036525; AsCpf1-1
aaaagccagggcccctgctgc

SEQ ID NO: 47457 - DNA, 22 bp, Artificial Sequence
  Synthetic: FXN 5 reverse 9:69036500-69036526; AsCpf1-1
aaaagccagggcccctgctgct

SEQ ID NO: 47458 - DNA, 23 bp, Artificial Sequence
  Synthetic: FXN 5 reverse 9:69036500-69036527; AsCpf1-1
aaaagccagggcccctgctgctc

SEQ ID NO: 47459 - DNA, 24 bp, Artificial Sequence
  Synthetic: FXN 5 reverse 9:69036500-69036528; AsCpf1-1
aaaagccagggcccctgctgctct

SEQ ID NO: 47460 - DNA, 25 bp, Artificial Sequence
  Synthetic: FXN 5 reverse 9:69036500-69036529; AsCpf1-1
aaaagccagggcccctgctgctcta

SEQ ID NO: 47461 - DNA, 18 bp, Artificial Sequence
  Synthetic: FXN 5 forward 9:69036545-69036567; AsCpf1-1
agattctgccccactccg

SEQ ID NO: 47462 - DNA, 19 bp, Artificial Sequence
  Synthetic: FXN 5 forward 9:69036545-69036568; AsCpf1-1
agattctgccccactccgc

SEQ ID NO: 47463 - DNA, 20 bp, Artificial Sequence
  Synthetic: FXN 5 forward 9:69036545-69036569; AsCpf1-1
agattctgccccactccgca

SEQ ID NO: 47464 - DNA, 21 bp, Artificial Sequence
  Synthetic: FXN 5 forward 9:69036545-69036570; AsCpf1-1
agattctgccccactccgcag

SEQ ID NO: 47465 - DNA, 22 bp, Artificial Sequence
  Synthetic: FXN 5 forward 9:69036545-69036571; AsCpf1-1
agattctgccccactccgcaga

SEQ ID NO: 47466 - DNA, 23 bp, Artificial Sequence
  Synthetic: FXN 5 forward 9:69036545-69036572; AsCpf1-1
agattctgccccactccgcagag

SEQ ID NO: 47467 - DNA, 24 bp, Artificial Sequence
  Synthetic: FXN 5 forward 9:69036545-69036573; AsCpf1-1
agattctgccccactccgcagagc

SEQ ID NO: 47468 - DNA, 25 bp, Artificial Sequence
  Synthetic: FXN 5 forward 9:69036545-69036574; AsCpf1-1
agattctgccccactccgcagagct

SEQ ID NO: 47469 - DNA, 18 bp, Artificial Sequence
  Synthetic: FXN 5 forward 9:69036546-69036568; AsCpf1-1
gattctgccccactccgc

SEQ ID NO: 47470 - DNA, 19 bp, Artificial Sequence
  Synthetic: FXN 5 forward 9:69036546-69036569; AsCpf1-1
gattctgccccactccgca

SEQ ID NO: 47471 - DNA, 20 bp, Artificial Sequence
  Synthetic: FXN 5 forward 9:69036546-69036570; AsCpf1-1
gattctgccccactccgcag

SEQ ID NO: 47472 - DNA, 21 bp, Artificial Sequence
  Synthetic: FXN 5 forward 9:69036546-69036571; AsCpf1-1
gattctgccccactccgcaga

SEQ ID NO: 47473 - DNA, 22 bp, Artificial Sequence
  Synthetic: FXN 5 forward 9:69036546-69036572; AsCpf1-1
gattctgccccactccgcagag

SEQ ID NO: 47474 - DNA, 23 bp, Artificial Sequence
  Synthetic: FXN 5 forward 9:69036546-69036573; AsCpf1-1
gattctgccccactccgcagagc

SEQ ID NO: 47475 - DNA, 24 bp, Artificial Sequence
  Synthetic: FXN 5 forward 9:69036546-69036574; AsCpf1-1
gattctgccccactccgcagagct

SEQ ID NO: 47476 - DNA, 25 bp, Artificial Sequence
  Synthetic: FXN 5 forward 9:69036546-69036575; AsCpf1-1
gattctgccccactccgcagagctg

SEQ ID NO: 47477 - DNA, 18 bp, Artificial Sequence
  Synthetic: FXN 5 reverse 9:69036561-69036583; AsCpf1-1
ccaaggtcacacagctct

SEQ ID NO: 47478 - DNA, 19 bp, Artificial Sequence
  Synthetic: FXN 5 reverse 9:69036561-69036584; AsCpf1-1
ccaaggtcacacagctctg

SEQ ID NO: 47479 - DNA, 20 bp, Artificial Sequence
  Synthetic: FXN 5 reverse 9:69036561-69036585; AsCpf1-1
ccaaggtcacacagctctgc

SEQ ID NO: 47480 - DNA, 21 bp, Artificial Sequence
  Synthetic: FXN 5 reverse 9:69036561-69036586; AsCpf1-1
ccaaggtcacacagctctgcg

SEQ ID NO: 47481 - DNA, 22 bp, Artificial Sequence
  Synthetic: FXN 5 reverse 9:69036561-69036587; AsCpf1-1
ccaaggtcacacagctctgcgg

SEQ ID NO: 47482 - DNA, 23 bp, Artificial Sequence
  Synthetic: FXN 5 reverse 9:69036561-69036588; AsCpf1-1
ccaaggtcacacagctctgcgga

SEQ ID NO: 47483 - DNA, 24 bp, Artificial Sequence
  Synthetic: FXN 5 reverse 9:69036561-69036589; AsCpf1-1
ccaaggtcacacagctctgcggag

SEQ ID NO: 47484 - DNA, 25 bp, Artificial Sequence
  Synthetic: FXN 5 reverse 9:69036561-69036590; AsCpf1-1
ccaaggtcacacagctctgcggagt

SEQ ID NO: 47485 - DNA, 18 bp, Artificial Sequence
  Synthetic: FXN 5 forward 9:69036563-69036585; AsCpf1-1
cagagctgtgtgaccttg

SEQ ID NO: 47486 - DNA, 19 bp, Artificial Sequence
  Synthetic: FXN 5 forward 9:69036563-69036586; AsCpf1-1
cagagctgtgtgaccttgg

SEQ ID NO: 47487 - DNA, 20 bp, Artificial Sequence
  Synthetic: FXN 5 forward 9:69036563-69036587; AsCpf1-1
cagagctgtgtgaccttggg

SEQ ID NO: 47488 - DNA, 21 bp, Artificial Sequence
  Synthetic: FXN 5 forward 9:69036563-69036588; AsCpf1-1
cagagctgtgtgaccttgggg

SEQ ID NO: 47489 - DNA, 22 bp, Artificial Sequence
  Synthetic: FXN 5 forward 9:69036563-69036589; AsCpf1-1
cagagctgtgtgaccttggggg

SEQ ID NO: 47490 - DNA, 23 bp, Artificial Sequence
  Synthetic: FXN 5 forward 9:69036563-69036590; AsCpf1-1
cagagctgtgtgaccttggggga

SEQ ID NO: 47491 - DNA, 24 bp, Artificial Sequence
  Synthetic: FXN 5 forward 9:69036563-69036591; AsCpf1-1
cagagctgtgtgaccttgggggat

SEQ ID NO: 47492 - DNA, 25 bp, Artificial Sequence
  Synthetic: FXN 5 forward 9:69036563-69036592; AsCpf1-1
cagagctgtgtgaccttgggggatt

SEQ ID NO: 47493 - DNA, 18 bp, Artificial Sequence
  Synthetic: FXN 5 forward 9:69036590-69036612; AsCpf1-1
cctaacctctctgagacg

SEQ ID NO: 47494 - DNA, 19 bp, Artificial Sequence
  Synthetic: FXN 5 forward 9:69036590-69036613; AsCpf1-1
cctaacctctctgagacgt

SEQ ID NO: 47495 - DNA, 20 bp, Artificial Sequence
  Synthetic: FXN 5 forward 9:69036590-69036614; AsCpf1-1
cctaacctctctgagacgtg

SEQ ID NO: 47496 - DNA, 21 bp, Artificial Sequence
  Synthetic: FXN 5 forward 9:69036590-69036615; AsCpf1-1
cctaacctctctgagacgtgg

SEQ ID NO: 47497 - DNA, 22 bp, Artificial Sequence
  Synthetic: FXN 5 forward 9:69036590-69036616; AsCpf1-1
cctaacctctctgagacgtggc

SEQ ID NO: 47498 - DNA, 23 bp, Artificial Sequence
  Synthetic: FXN 5 forward 9:69036590-69036617; AsCpf1-1
cctaacctctctgagacgtggct

SEQ ID NO: 47499 - DNA, 24 bp, Artificial Sequence
  Synthetic: FXN 5 forward 9:69036590-69036618; AsCpf1-1
cctaacctctctgagacgtggctt

SEQ ID NO: 47500 - DNA, 25 bp, Artificial Sequence
  Synthetic: FXN 5 forward 9:69036590-69036619; AsCpf1-1
cctaacctctctgagacgtggcttt

SEQ ID NO: 47501 - DNA, 18 bp, Artificial Sequence
  Synthetic: FXN 5 forward 9:69036591-69036613; AsCpf1-1
ctaacctctctgagacgt

SEQ ID NO: 47502 - DNA, 19 bp, Artificial Sequence
  Synthetic: FXN 5 forward 9:69036591-69036614; AsCpf1-1
ctaacctctctgagacgtg

SEQ ID NO: 47503 - DNA, 20 bp, Artificial Sequence
  Synthetic: FXN 5 forward 9:69036591-69036615; AsCpf1-1
ctaacctctctgagacgtgg

SEQ ID NO: 47504 - DNA, 21 bp, Artificial Sequence
  Synthetic: FXN 5 forward 9:69036591-69036616; AsCpf1-1
ctaacctctctgagacgtggc

SEQ ID NO: 47505 - DNA, 22 bp, Artificial Sequence
  Synthetic: FXN 5 forward 9:69036591-69036617; AsCpf1-1
ctaacctctctgagacgtggct

SEQ ID NO: 47506 - DNA, 23 bp, Artificial Sequence
  Synthetic: FXN 5 forward 9:69036591-69036618; AsCpf1-1
ctaacctctctgagacgtggctt

SEQ ID NO: 47507 - DNA, 24 bp, Artificial Sequence
  Synthetic: FXN 5 forward 9:69036591-69036619; AsCpf1-1
ctaacctctctgagacgtggcttt

SEQ ID NO: 47508 - DNA, 25 bp, Artificial Sequence
  Synthetic: FXN 5 forward 9:69036591-69036620; AsCpf1-1
ctaacctctctgagacgtggctttg

SEQ ID NO: 47509 - DNA, 18 bp, Artificial Sequence
  Synthetic: FXN 5 reverse 9:69036604-69036626; AsCpf1-1
tacagaaaacaaagccac

SEQ ID NO: 47510 - DNA, 19 bp, Artificial Sequence
  Synthetic: FXN 5 reverse 9:69036604-69036627; AsCpf1-1
tacagaaaacaaagccacg

SEQ ID NO: 47511 - DNA, 20 bp, Artificial Sequence
  Synthetic: FXN 5 reverse 9:69036604-69036628; AsCpf1-1
tacagaaaacaaagccacgt

SEQ ID NO: 47512 - DNA, 21 bp, Artificial Sequence
  Synthetic: FXN 5 reverse 9:69036604-69036629; AsCpf1-1
tacagaaaacaaagccacgtc

SEQ ID NO: 47513 - DNA, 22 bp, Artificial Sequence
  Synthetic: FXN 5 reverse 9:69036604-69036630; AsCpf1-1
tacagaaaacaaagccacgtct

SEQ ID NO: 47514 - DNA, 23 bp, Artificial Sequence
  Synthetic: FXN 5 reverse 9:69036604-69036631; AsCpf1-1
tacagaaaacaaagccacgtctc

SEQ ID NO: 47515 - DNA, 24 bp, Artificial Sequence
  Synthetic: FXN 5 reverse 9:69036604-69036632; AsCpf1-1
tacagaaaacaaagccacgtctca

SEQ ID NO: 47516 - DNA, 25 bp, Artificial Sequence
  Synthetic: FXN 5 reverse 9:69036604-69036633; AsCpf1-1
tacagaaaacaaagccacgtctcag

SEQ ID NO: 47517 - DNA, 18 bp, Artificial Sequence
  Synthetic: FXN 5 reverse 9:69036633-69036655; AsCpf1-1
caaaatgggcgtcacctt

SEQ ID NO: 47518 - DNA, 19 bp, Artificial Sequence
  Synthetic: FXN 5 reverse 9:69036633-69036656; AsCpf1-1
caaaatgggcgtcaccttt

SEQ ID NO: 47519 - DNA, 20 bp, Artificial Sequence
  Synthetic: FXN 5 reverse 9:69036633-69036657; AsCpf1-1
caaaatgggcgtcaccttta

SEQ ID NO: 47520 - DNA, 21 bp, Artificial Sequence
  Synthetic: FXN 5 reverse 9:69036633-69036658; AsCpf1-1
caaaatgggcgtcacctttat

SEQ ID NO: 47521 - DNA, 22 bp, Artificial Sequence
  Synthetic: FXN 5 reverse 9:69036633-69036659; AsCpf1-1
caaaatgggcgtcacctttatc

SEQ ID NO: 47522 - DNA, 23 bp, Artificial Sequence
  Synthetic: FXN 5 reverse 9:69036633-69036660; AsCpf1-1
caaaatgggcgtcacctttatct

SEQ ID NO: 47523 - DNA, 24 bp, Artificial Sequence
  Synthetic: FXN 5 reverse 9:69036633-69036661; AsCpf1-1
caaaatgggcgtcacctttatctt

SEQ ID NO: 47524 - DNA, 25 bp, Artificial Sequence
  Synthetic: FXN 5 reverse 9:69036633-69036662; AsCpf1-1
caaaatgggcgtcacctttatcttc

SEQ ID NO: 47525 - DNA, 18 bp, Artificial Sequence
  Synthetic: FXN 5 reverse 9:69036656-69036678; AsCpf1-1
atttaatcctcacaccag

SEQ ID NO: 47526 - DNA, 19 bp, Artificial Sequence
  Synthetic: FXN 5 reverse 9:69036656-69036679; AsCpf1-1
atttaatcctcacaccagg

SEQ ID NO: 47527 - DNA, 20 bp, Artificial Sequence
  Synthetic: FXN 5 reverse 9:69036656-69036680; AsCpf1-1
atttaatcctcacaccaggt

SEQ ID NO: 47528 - DNA, 21 bp, Artificial Sequence
  Synthetic: FXN 5 reverse 9:69036656-69036681; AsCpf1-1
atttaatcctcacaccaggtc

SEQ ID NO: 47529 - DNA, 22 bp, Artificial Sequence
  Synthetic: FXN 5 reverse 9:69036656-69036682; AsCpf1-1
atttaatcctcacaccaggtcc

SEQ ID NO: 47530 - DNA, 23 bp, Artificial Sequence
  Synthetic: FXN 5 reverse 9:69036656-69036683; AsCpf1-1
atttaatcctcacaccaggtccg

SEQ ID NO: 47531 - DNA, 24 bp, Artificial Sequence
  Synthetic: FXN 5 reverse 9:69036656-69036684; AsCpf1-1
atttaatcctcacaccaggtccgc

SEQ ID NO: 47532 - DNA, 25 bp, Artificial Sequence
  Synthetic: FXN 5 reverse 9:69036656-69036685; AsCpf1-1
atttaatcctcacaccaggtccgca

SEQ ID NO: 47533 - DNA, 18 bp, Artificial Sequence
  Synthetic: FXN 5 reverse 9:69036657-69036679; AsCpf1-1
catttaatcctcacacca

SEQ ID NO: 47534 - DNA, 19 bp, Artificial Sequence
  Synthetic: FXN 5 reverse 9:69036657-69036680; AsCpf1-1
catttaatcctcacaccag

SEQ ID NO: 47535 - DNA, 20 bp, Artificial Sequence
  Synthetic: FXN 5 reverse 9:69036657-69036681; AsCpf1-1
catttaatcctcacaccagg

SEQ ID NO: 47536 - DNA, 21 bp, Artificial Sequence
  Synthetic: FXN 5 reverse 9:69036657-69036682; AsCpf1-1
catttaatcctcacaccaggt

SEQ ID NO: 47537 - DNA, 22 bp, Artificial Sequence
  Synthetic: FXN 5 reverse 9:69036657-69036683; AsCpf1-1
catttaatcctcacaccaggtc

SEQ ID NO: 47538 - DNA, 23 bp, Artificial Sequence
  Synthetic: FXN 5 reverse 9:69036657-69036684; AsCpf1-1
catttaatcctcacaccaggtcc

SEQ ID NO: 47539 - DNA, 24 bp, Artificial Sequence
  Synthetic: FXN 5 reverse 9:69036657-69036685; AsCpf1-1
catttaatcctcacaccaggtccg

SEQ ID NO: 47540 - DNA, 25 bp, Artificial Sequence
  Synthetic: FXN 5 reverse 9:69036657-69036686; AsCpf1-1
catttaatcctcacaccaggtccgc

SEQ ID NO: 47541 - DNA, 18 bp, Artificial Sequence
  Synthetic: FXN 5 forward 9:69036702-69036724; AsCpf1-1
gaacttcaaattagttcc

SEQ ID NO: 47542 - DNA, 19 bp, Artificial Sequence
  Synthetic: FXN 5 forward 9:69036702-69036725; AsCpf1-1
gaacttcaaattagttccc

SEQ ID NO: 47543 - DNA, 20 bp, Artificial Sequence
  Synthetic: FXN 5 forward 9:69036702-69036726; AsCpf1-1
gaacttcaaattagttcccc

SEQ ID NO: 47544 - DNA, 21 bp, Artificial Sequence
  Synthetic: FXN 5 forward 9:69036702-69036727; AsCpf1-1
gaacttcaaattagttcccct

SEQ ID NO: 47545 - DNA, 22 bp, Artificial Sequence
  Synthetic: FXN 5 forward 9:69036702-69036728; AsCpf1-1
gaacttcaaattagttcccctt

SEQ ID NO: 47546 - DNA, 23 bp, Artificial Sequence
  Synthetic: FXN 5 forward 9:69036702-69036729; AsCpf1-1
gaacttcaaattagttccccttt

SEQ ID NO: 47547 - DNA, 24 bp, Artificial Sequence
  Synthetic: FXN 5 forward 9:69036702-69036730; AsCpf1-1
gaacttcaaattagttcccctttc

SEQ ID NO: 47548 - DNA, 25 bp, Artificial Sequence
  Synthetic: FXN 5 forward 9:69036702-69036731; AsCpf1-1
gaacttcaaattagttcccctttct

SEQ ID NO: 47549 - DNA, 18 bp, Artificial Sequence
  Synthetic: FXN 5 forward 9:69036710-69036732; AsCpf1-1
aattagttcccctttctt

SEQ ID NO: 47550 - DNA, 19 bp, Artificial Sequence
  Synthetic: FXN 5 forward 9:69036710-69036733; AsCpf1-1
aattagttcccctttcttc

SEQ ID NO: 47551 - DNA, 20 bp, Artificial Sequence
  Synthetic: FXN 5 forward 9:69036710-69036734; AsCpf1-1
aattagttcccctttcttcc

SEQ ID NO: 47552 - DNA, 21 bp, Artificial Sequence
  Synthetic: FXN 5 forward 9:69036710-69036735; AsCpf1-1
aattagttcccctttcttcct

SEQ ID NO: 47553 - DNA, 22 bp, Artificial Sequence
  Synthetic: FXN 5 forward 9:69036710-69036736; AsCpf1-1
aattagttcccctttcttcctt

SEQ ID NO: 47554 - DNA, 23 bp, Artificial Sequence
  Synthetic: FXN 5 forward 9:69036710-69036737; AsCpf1-1
aattagttcccctttcttccttt

SEQ ID NO: 47555 - DNA, 24 bp, Artificial Sequence
  Synthetic: FXN 5 forward 9:69036710-69036738; AsCpf1-1
aattagttcccctttcttcctttg

SEQ ID NO: 47556 - DNA, 25 bp, Artificial Sequence
  Synthetic: FXN 5 forward 9:69036710-69036739; AsCpf1-1
aattagttcccctttcttcctttgg

SEQ ID NO: 47557 - DNA, 18 bp, Artificial Sequence
  Synthetic: FXN 5 forward 9:69036720-69036742; AsCpf1-1
cctttcttcctttggggg

SEQ ID NO: 47558 - DNA, 19 bp, Artificial Sequence
  Synthetic: FXN 5 forward 9:69036720-69036743; AsCpf1-1
cctttcttcctttgggggg

SEQ ID NO: 47559 - DNA, 20 bp, Artificial Sequence
  Synthetic: FXN 5 forward 9:69036720-69036744; AsCpf1-1
cctttcttcctttggggggt

SEQ ID NO: 47560 - DNA, 21 bp, Artificial Sequence
  Synthetic: FXN 5 forward 9:69036720-69036745; AsCpf1-1
cctttcttcctttggggggta

SEQ ID NO: 47561 - DNA, 22 bp, Artificial Sequence
  Synthetic: FXN 5 forward 9:69036720-69036746; AsCpf1-1
cctttcttcctttggggggtac

SEQ ID NO: 47562 - DNA, 23 bp, Artificial Sequence
  Synthetic: FXN 5 forward 9:69036720-69036747; AsCpf1-1
cctttcttcctttggggggtaca

SEQ ID NO: 47563 - DNA, 24 bp, Artificial Sequence
  Synthetic: FXN 5 forward 9:69036720-69036748; AsCpf1-1
cctttcttcctttggggggtacaa

SEQ ID NO: 47564 - DNA, 25 bp, Artificial Sequence
  Synthetic: FXN 5 forward 9:69036720-69036749; AsCpf1-1
cctttcttcctttggggggtacaaa

SEQ ID NO: 47565 - DNA, 18 bp, Artificial Sequence
  Synthetic: FXN 5 forward 9:69036721-69036743; AsCpf1-1
ctttcttcctttgggggg

SEQ ID NO: 47566 - DNA, 19 bp, Artificial Sequence
  Synthetic: FXN 5 forward 9:69036721-69036744; AsCpf1-1
ctttcttcctttggggggt

SEQ ID NO: 47567 - DNA, 20 bp, Artificial Sequence
  Synthetic: FXN 5 forward 9:69036721-69036745; AsCpf1-1
ctttcttcctttggggggta

SEQ ID NO: 47568 - DNA, 21 bp, Artificial Sequence
  Synthetic: FXN 5 forward 9:69036721-69036746; AsCpf1-1
ctttcttcctttggggggtac

SEQ ID NO: 47569 - DNA, 22 bp, Artificial Sequence
  Synthetic: FXN 5 forward 9:69036721-69036747; AsCpf1-1
ctttcttcctttggggggtaca

SEQ ID NO: 47570 - DNA, 23 bp, Artificial Sequence
  Synthetic: FXN 5 forward 9:69036721-69036748; AsCpf1-1
ctttcttcctttggggggtacaa

SEQ ID NO: 47571 - DNA, 24 bp, Artificial Sequence
  Synthetic: FXN 5 forward 9:69036721-69036749; AsCpf1-1
ctttcttcctttggggggtacaaa

SEQ ID NO: 47572 - DNA, 25 bp, Artificial Sequence
  Synthetic: FXN 5 forward 9:69036721-69036750; AsCpf1-1
ctttcttcctttggggggtacaaag

SEQ ID NO: 47573 - DNA, 18 bp, Artificial Sequence
  Synthetic: FXN 5 forward 9:69036730-69036752; AsCpf1-1
tttggggggtacaaagaa

SEQ ID NO: 47574 - DNA, 19 bp, Artificial Sequence
  Synthetic: FXN 5 forward 9:69036730-69036753; AsCpf1-1
tttggggggtacaaagaaa

SEQ ID NO: 47575 - DNA, 20 bp, Artificial Sequence
  Synthetic: FXN 5 forward 9:69036730-69036754; AsCpf1-1
tttggggggtacaaagaaat

SEQ ID NO: 47576 - DNA, 21 bp, Artificial Sequence
  Synthetic: FXN 5 forward 9:69036730-69036755; AsCpf1-1
tttggggggtacaaagaaata

SEQ ID NO: 47577 - DNA, 22 bp, Artificial Sequence
  Synthetic: FXN 5 forward 9:69036730-69036756; AsCpf1-1
tttggggggtacaaagaaatat

SEQ ID NO: 47578 - DNA, 23 bp, Artificial Sequence
  Synthetic: FXN 5 forward 9:69036730-69036757; AsCpf1-1
tttggggggtacaaagaaatatc

SEQ ID NO: 47579 - DNA, 24 bp, Artificial Sequence
  Synthetic: FXN 5 forward 9:69036730-69036758; AsCpf1-1
tttggggggtacaaagaaatatct

SEQ ID NO: 47580 - DNA, 25 bp, Artificial Sequence
  Synthetic: FXN 5 forward 9:69036730-69036759; AsCpf1-1
tttggggggtacaaagaaatatctg

SEQ ID NO: 47581 - DNA, 18 bp, Artificial Sequence
  Synthetic: FXN 5 reverse 9:69036753-69036775; AsCpf1-1
agccgtggcgtaactggg

SEQ ID NO: 47582 - DNA, 19 bp, Artificial Sequence
  Synthetic: FXN 5 reverse 9:69036753-69036776; AsCpf1-1
agccgtggcgtaactgggt

SEQ ID NO: 47583 - DNA, 20 bp, Artificial Sequence
  Synthetic: FXN 5 reverse 9:69036753-69036777; AsCpf1-1
agccgtggcgtaactgggtc

SEQ ID NO: 47584 - DNA, 21 bp, Artificial Sequence
  Synthetic: FXN 5 reverse 9:69036753-69036778; AsCpf1-1
agccgtggcgtaactgggtca

SEQ ID NO: 47585 - DNA, 22 bp, Artificial Sequence
  Synthetic: FXN 5 reverse 9:69036753-69036779; AsCpf1-1
agccgtggcgtaactgggtcag

SEQ ID NO: 47586 - DNA, 23 bp, Artificial Sequence
  Synthetic: FXN 5 reverse 9:69036753-69036780; AsCpf1-1
agccgtggcgtaactgggtcaga

SEQ ID NO: 47587 - DNA, 24 bp, Artificial Sequence
  Synthetic: FXN 5 reverse 9:69036753-69036781; AsCpf1-1
agccgtggcgtaactgggtcagat

SEQ ID NO: 47588 - DNA, 25 bp, Artificial Sequence
  Synthetic: FXN 5 reverse 9:69036753-69036782; AsCpf1-1
agccgtggcgtaactgggtcagata

SEQ ID NO: 47589 - DNA, 18 bp, Artificial Sequence
  Synthetic: FXN 5 reverse 9:69036761-69036783; AsCpf1-1
tcctttcaagccgtggcg

SEQ ID NO: 47590 - DNA, 19 bp, Artificial Sequence
  Synthetic: FXN 5 reverse 9:69036761-69036784; AsCpf1-1
tcctttcaagccgtggcgt

SEQ ID NO: 47591 - DNA, 20 bp, Artificial Sequence
  Synthetic: FXN 5 reverse 9:69036761-69036785; AsCpf1-1
tcctttcaagccgtggcgta

SEQ ID NO: 47592 - DNA, 21 bp, Artificial Sequence
  Synthetic: FXN 5 reverse 9:69036761-69036786; AsCpf1-1
tcctttcaagccgtggcgtaa

SEQ ID NO: 47593 - DNA, 22 bp, Artificial Sequence
  Synthetic: FXN 5 reverse 9:69036761-69036787; AsCpf1-1
tcctttcaagccgtggcgtaac

SEQ ID NO: 47594 - DNA, 23 bp, Artificial Sequence
  Synthetic: FXN 5 reverse 9:69036761-69036788; AsCpf1-1
tcctttcaagccgtggcgtaact

SEQ ID NO: 47595 - DNA, 24 bp, Artificial Sequence
  Synthetic: FXN 5 reverse 9:69036761-69036789; AsCpf1-1
tcctttcaagccgtggcgtaactg

SEQ ID NO: 47596 - DNA, 25 bp, Artificial Sequence
  Synthetic: FXN 5 reverse 9:69036761-69036790; AsCpf1-1
tcctttcaagccgtggcgtaactgg

SEQ ID NO: 47597 - DNA, 18 bp, Artificial Sequence
  Synthetic: FXN 5 reverse 9:69036783-69036805; AsCpf1-1
cacagccattctttgggt

SEQ ID NO: 47598 - DNA, 19 bp, Artificial Sequence
  Synthetic: FXN 5 reverse 9:69036783-69036806; AsCpf1-1
cacagccattctttgggtt

SEQ ID NO: 47599 - DNA, 20 bp, Artificial Sequence
  Synthetic: FXN 5 reverse 9:69036783-69036807; AsCpf1-1
cacagccattctttgggttt

SEQ ID NO: 47600 - DNA, 21 bp, Artificial Sequence
  Synthetic: FXN 5 reverse 9:69036783-69036808; AsCpf1-1
cacagccattctttgggtttc

SEQ ID NO: 47601 - DNA, 22 bp, Artificial Sequence
  Synthetic: FXN 5 reverse 9:69036783-69036809; AsCpf1-1
cacagccattctttgggtttcc

SEQ ID NO: 47602 - DNA, 23 bp, Artificial Sequence
  Synthetic: FXN 5 reverse 9:69036783-69036810; AsCpf1-1
cacagccattctttgggtttcct

SEQ ID NO: 47603 - DNA, 24 bp, Artificial Sequence
  Synthetic: FXN 5 reverse 9:69036783-69036811; AsCpf1-1
cacagccattctttgggtttcctc

SEQ ID NO: 47604 - DNA, 25 bp, Artificial Sequence
  Synthetic: FXN 5 reverse 9:69036783-69036812; AsCpf1-1
cacagccattctttgggtttcctcc

SEQ ID NO: 47605 - DNA, 18 bp, Artificial Sequence
  Synthetic: FXN 5 reverse 9:69036790-69036812; AsCpf1-1
tcatccccacagccattc

SEQ ID NO: 47606 - DNA, 19 bp, Artificial Sequence
  Synthetic: FXN 5 reverse 9:69036790-69036813; AsCpf1-1
tcatccccacagccattct

SEQ ID NO: 47607 - DNA, 20 bp, Artificial Sequence
  Synthetic: FXN 5 reverse 9:69036790-69036814; AsCpf1-1
tcatccccacagccattctt

SEQ ID NO: 47608 - DNA, 21 bp, Artificial Sequence
  Synthetic: FXN 5 reverse 9:69036790-69036815; AsCpf1-1
tcatccccacagccattcttt

SEQ ID NO: 47609 - DNA, 22 bp, Artificial Sequence
  Synthetic: FXN 5 reverse 9:69036790-69036816; AsCpf1-1
tcatccccacagccattctttg

SEQ ID NO: 47610 - DNA, 23 bp, Artificial Sequence
  Synthetic: FXN 5 reverse 9:69036790-69036817; AsCpf1-1
tcatccccacagccattctttgg

SEQ ID NO: 47611 - DNA, 24 bp, Artificial Sequence
  Synthetic: FXN 5 reverse 9:69036790-69036818; AsCpf1-1
tcatccccacagccattctttggg

SEQ ID NO: 47612 - DNA, 25 bp, Artificial Sequence
  Synthetic: FXN 5 reverse 9:69036790-69036819; AsCpf1-1
tcatccccacagccattctttgggt

SEQ ID NO: 47613 - DNA, 18 bp, Artificial Sequence
  Synthetic: FXN 5 reverse 9:69036805-69036827; AsCpf1-1
cttgaggaatcttcctca

SEQ ID NO: 47614 - DNA, 19 bp, Artificial Sequence
  Synthetic: FXN 5 reverse 9:69036805-69036828; AsCpf1-1
cttgaggaatcttcctcat

SEQ ID NO: 47615 - DNA, 20 bp, Artificial Sequence
  Synthetic: FXN 5 reverse 9:69036805-69036829; AsCpf1-1
cttgaggaatcttcctcatc

SEQ ID NO: 47616 - DNA, 21 bp, Artificial Sequence
  Synthetic: FXN 5 reverse 9:69036805-69036830; AsCpf1-1
cttgaggaatcttcctcatcc

SEQ ID NO: 47617 - DNA, 22 bp, Artificial Sequence
  Synthetic: FXN 5 reverse 9:69036805-69036831; AsCpf1-1
cttgaggaatcttcctcatccc

SEQ ID NO: 47618 - DNA, 23 bp, Artificial Sequence
  Synthetic: FXN 5 reverse 9:69036805-69036832; AsCpf1-1
cttgaggaatcttcctcatcccc

SEQ ID NO: 47619 - DNA, 24 bp, Artificial Sequence
  Synthetic: FXN 5 reverse 9:69036805-69036833; AsCpf1-1
cttgaggaatcttcctcatcccca

SEQ ID NO: 47620 - DNA, 25 bp, Artificial Sequence
  Synthetic: FXN 5 reverse 9:69036805-69036834; AsCpf1-1
cttgaggaatcttcctcatccccac

SEQ ID NO: 47621 - DNA, 18 bp, Artificial Sequence
  Synthetic: FXN 5 forward 9:69036821-69036843; AsCpf1-1
tcaaggggaggacatggt

SEQ ID NO: 47622 - DNA, 19 bp, Artificial Sequence
  Synthetic: FXN 5 forward 9:69036821-69036844; AsCpf1-1
tcaaggggaggacatggta

SEQ ID NO: 47623 - DNA, 20 bp, Artificial Sequence
  Synthetic: FXN 5 forward 9:69036821-69036845; AsCpf1-1
tcaaggggaggacatggtat

SEQ ID NO: 47624 - DNA, 21 bp, Artificial Sequence
  Synthetic: FXN 5 forward 9:69036821-69036846; AsCpf1-1
tcaaggggaggacatggtatt

SEQ ID NO: 47625 - DNA, 22 bp, Artificial Sequence
  Synthetic: FXN 5 forward 9:69036821-69036847; AsCpf1-1
tcaaggggaggacatggtattt

SEQ ID NO: 47626 - DNA, 23 bp, Artificial Sequence
  Synthetic: FXN 5 forward 9:69036821-69036848; AsCpf1-1
tcaaggggaggacatggtattta

SEQ ID NO: 47627 - DNA, 24 bp, Artificial Sequence
  Synthetic: FXN 5 forward 9:69036821-69036849; AsCpf1-1
tcaaggggaggacatggtatttaa

SEQ ID NO: 47628 - DNA, 25 bp, Artificial Sequence
  Synthetic: FXN 5 forward 9:69036821-69036850; AsCpf1-1
tcaaggggaggacatggtatttaat

SEQ ID NO: 47629 - DNA, 18 bp, Artificial Sequence
  Synthetic: FXN 5 reverse 9:69036833-69036855; AsCpf1-1
agaccctcattaaatacc

SEQ ID NO: 47630 - DNA, 19 bp, Artificial Sequence
  Synthetic: FXN 5 reverse 9:69036833-69036856; AsCpf1-1
agaccctcattaaatacca

SEQ ID NO: 47631 - DNA, 20 bp, Artificial Sequence
  Synthetic: FXN 5 reverse 9:69036833-69036857; AsCpf1-1
agaccctcattaaataccat

SEQ ID NO: 47632 - DNA, 21 bp, Artificial Sequence
  Synthetic: FXN 5 reverse 9:69036833-69036858; AsCpf1-1
agaccctcattaaataccatg

SEQ ID NO: 47633 - DNA, 22 bp, Artificial Sequence
  Synthetic: FXN 5 reverse 9:69036833-69036859; AsCpf1-1
agaccctcattaaataccatgt

SEQ ID NO: 47634 - DNA, 23 bp, Artificial Sequence
  Synthetic: FXN 5 reverse 9:69036833-69036860; AsCpf1-1
agaccctcattaaataccatgtc

SEQ ID NO: 47635 - DNA, 24 bp, Artificial Sequence
  Synthetic: FXN 5 reverse 9:69036833-69036861; AsCpf1-1
agaccctcattaaataccatgtcc

SEQ ID NO: 47636 - DNA, 25 bp, Artificial Sequence
  Synthetic: FXN 5 reverse 9:69036833-69036862; AsCpf1-1
agaccctcattaaataccatgtcct

SEQ ID NO: 47637 - DNA, 18 bp, Artificial Sequence
  Synthetic: FXN 5 reverse 9:69036845-69036867; AsCpf1-1
ttggcatcttcaagaccc

SEQ ID NO: 47638 - DNA, 19 bp, Artificial Sequence
  Synthetic: FXN 5 reverse 9:69036845-69036868; AsCpf1-1
ttggcatcttcaagaccct

SEQ ID NO: 47639 - DNA, 20 bp, Artificial Sequence
  Synthetic: FXN 5 reverse 9:69036845-69036869; AsCpf1-1
ttggcatcttcaagaccctc

SEQ ID NO: 47640 - DNA, 21 bp, Artificial Sequence
  Synthetic: FXN 5 reverse 9:69036845-69036870; AsCpf1-1
ttggcatcttcaagaccctca

SEQ ID NO: 47641 - DNA, 22 bp, Artificial Sequence
  Synthetic: FXN 5 reverse 9:69036845-69036871; AsCpf1-1
ttggcatcttcaagaccctcat

SEQ ID NO: 47642 - DNA, 23 bp, Artificial Sequence
  Synthetic: FXN 5 reverse 9:69036845-69036872; AsCpf1-1
ttggcatcttcaagaccctcatt

SEQ ID NO: 47643 - DNA, 24 bp, Artificial Sequence
  Synthetic: FXN 5 reverse 9:69036845-69036873; AsCpf1-1
ttggcatcttcaagaccctcatta

SEQ ID NO: 47644 - DNA, 25 bp, Artificial Sequence
  Synthetic: FXN 5 reverse 9:69036845-69036874; AsCpf1-1
ttggcatcttcaagaccctcattaa

SEQ ID NO: 47645 - DNA, 18 bp, Artificial Sequence
  Synthetic: FXN 5 reverse 9:69036873-69036895; AsCpf1-1
tcctcgtgaaacaccctc

SEQ ID NO: 47646 - DNA, 19 bp, Artificial Sequence
  Synthetic: FXN 5 reverse 9:69036873-69036896; AsCpf1-1
tcctcgtgaaacaccctct

SEQ ID NO: 47647 - DNA, 20 bp, Artificial Sequence
  Synthetic: FXN 5 reverse 9:69036873-69036897; AsCpf1-1
tcctcgtgaaacaccctcta

SEQ ID NO: 47648 - DNA, 21 bp, Artificial Sequence
  Synthetic: FXN 5 reverse 9:69036873-69036898; AsCpf1-1
tcctcgtgaaacaccctctac

SEQ ID NO: 47649 - DNA, 22 bp, Artificial Sequence
  Synthetic: FXN 5 reverse 9:69036873-69036899; AsCpf1-1
tcctcgtgaaacaccctctacc

SEQ ID NO: 47650 - DNA, 23 bp, Artificial Sequence
  Synthetic: FXN 5 reverse 9:69036873-69036900; AsCpf1-1
tcctcgtgaaacaccctctacca

SEQ ID NO: 47651 - DNA, 24 bp, Artificial Sequence
  Synthetic: FXN 5 reverse 9:69036873-69036901; AsCpf1-1
tcctcgtgaaacaccctctaccac

SEQ ID NO: 47652 - DNA, 25 bp, Artificial Sequence
  Synthetic: FXN 5 reverse 9:69036873-69036902; AsCpf1-1
tcctcgtgaaacaccctctaccact

SEQ ID NO: 47653 - DNA, 18 bp, Artificial Sequence
  Synthetic: FXN 5 reverse 9:69036874-69036896; AsCpf1-1
ctcctcgtgaaacaccct

SEQ ID NO: 47654 - DNA, 19 bp, Artificial Sequence
  Synthetic: FXN 5 reverse 9:69036874-69036897; AsCpf1-1
ctcctcgtgaaacaccctc

SEQ ID NO: 47655 - DNA, 20 bp, Artificial Sequence
  Synthetic: FXN 5 reverse 9:69036874-69036898; AsCpf1-1
ctcctcgtgaaacaccctct

SEQ ID NO: 47656 - DNA, 21 bp, Artificial Sequence
  Synthetic: FXN 5 reverse 9:69036874-69036899; AsCpf1-1
ctcctcgtgaaacaccctcta

SEQ ID NO: 47657 - DNA, 22 bp, Artificial Sequence
  Synthetic: FXN 5 reverse 9:69036874-69036900; AsCpf1-1
ctcctcgtgaaacaccctctac

SEQ ID NO: 47658 - DNA, 23 bp, Artificial Sequence
  Synthetic: FXN 5 reverse 9:69036874-69036901; AsCpf1-1
ctcctcgtgaaacaccctctacc

SEQ ID NO: 47659 - DNA, 24 bp, Artificial Sequence
  Synthetic: FXN 5 reverse 9:69036874-69036902; AsCpf1-1
ctcctcgtgaaacaccctctacca

SEQ ID NO: 47660 - DNA, 25 bp, Artificial Sequence
  Synthetic: FXN 5 reverse 9:69036874-69036903; AsCpf1-1
ctcctcgtgaaacaccctctaccac

SEQ ID NO: 47661 - DNA, 18 bp, Artificial Sequence
  Synthetic: FXN 5 forward 9:69036888-69036910; AsCpf1-1
cgaggagggaaccgtctg

SEQ ID NO: 47662 - DNA, 19 bp, Artificial Sequence
  Synthetic: FXN 5 forward 9:69036888-69036911; AsCpf1-1
cgaggagggaaccgtctgg

SEQ ID NO: 47663 - DNA, 20 bp, Artificial Sequence
  Synthetic: FXN 5 forward 9:69036888-69036912; AsCpf1-1
cgaggagggaaccgtctggg

SEQ ID NO: 47664 - DNA, 21 bp, Artificial Sequence
  Synthetic: FXN 5 forward 9:69036888-69036913; AsCpf1-1
cgaggagggaaccgtctgggc

SEQ ID NO: 47665 - DNA, 22 bp, Artificial Sequence
  Synthetic: FXN 5 forward 9:69036888-69036914; AsCpf1-1
cgaggagggaaccgtctgggca

SEQ ID NO: 47666 - DNA, 23 bp, Artificial Sequence
  Synthetic: FXN 5 forward 9:69036888-69036915; AsCpf1-1
cgaggagggaaccgtctgggcaa

SEQ ID NO: 47667 - DNA, 24 bp, Artificial Sequence
  Synthetic: FXN 5 forward 9:69036888-69036916; AsCpf1-1
cgaggagggaaccgtctgggcaaa

SEQ ID NO: 47668 - DNA, 25 bp, Artificial Sequence
  Synthetic: FXN 5 forward 9:69036888-69036917; AsCpf1-1
cgaggagggaaccgtctgggcaaag

SEQ ID NO: 47669 - DNA, 18 bp, Artificial Sequence
  Synthetic: FXN 5 reverse 9:69036896-69036918; AsCpf1-1
tggcctttgcccagacgg

SEQ ID NO: 47670 - DNA, 19 bp, Artificial Sequence
  Synthetic: FXN 5 reverse 9:69036896-69036919; AsCpf1-1
tggcctttgcccagacggt

SEQ ID NO: 47671 - DNA, 20 bp, Artificial Sequence
  Synthetic: FXN 5 reverse 9:69036896-69036920; AsCpf1-1
tggcctttgcccagacggtt

SEQ ID NO: 47672 - DNA, 21 bp, Artificial Sequence
  Synthetic: FXN 5 reverse 9:69036896-69036921; AsCpf1-1
tggcctttgcccagacggttc

SEQ ID NO: 47673 - DNA, 22 bp, Artificial Sequence
  Synthetic: FXN 5 reverse 9:69036896-69036922; AsCpf1-1
tggcctttgcccagacggttcc

SEQ ID NO: 47674 - DNA, 23 bp, Artificial Sequence
  Synthetic: FXN 5 reverse 9:69036896-69036923; AsCpf1-1
tggcctttgcccagacggttccc

SEQ ID NO: 47675 - DNA, 24 bp, Artificial Sequence
  Synthetic: FXN 5 reverse 9:69036896-69036924; AsCpf1-1
tggcctttgcccagacggttccct

SEQ ID NO: 47676 - DNA, 25 bp, Artificial Sequence
  Synthetic: FXN 5 reverse 9:69036896-69036925; AsCpf1-1
tggcctttgcccagacggttccctc

SEQ ID NO: 47677 - DNA, 18 bp, Artificial Sequence
  Synthetic: FXN 5 reverse 9:69036902-69036924; AsCpf1-1
ccttcctggcctttgccc

SEQ ID NO: 47678 - DNA, 19 bp, Artificial Sequence
  Synthetic: FXN 5 reverse 9:69036902-69036925; AsCpf1-1
ccttcctggcctttgccca

SEQ ID NO: 47679 - DNA, 20 bp, Artificial Sequence
  Synthetic: FXN 5 reverse 9:69036902-69036926; AsCpf1-1
ccttcctggcctttgcccag

SEQ ID NO: 47680 - DNA, 21 bp, Artificial Sequence
  Synthetic: FXN 5 reverse 9:69036902-69036927; AsCpf1-1
ccttcctggcctttgcccaga

SEQ ID NO: 47681 - DNA, 22 bp, Artificial Sequence
  Synthetic: FXN 5 reverse 9:69036902-69036928; AsCpf1-1
ccttcctggcctttgcccagac

SEQ ID NO: 47682 - DNA, 23 bp, Artificial Sequence
  Synthetic: FXN 5 reverse 9:69036902-69036929; AsCpf1-1
ccttcctggcctttgcccagacg

SEQ ID NO: 47683 - DNA, 24 bp, Artificial Sequence
  Synthetic: FXN 5 reverse 9:69036902-69036930; AsCpf1-1
ccttcctggcctttgcccagacgg

SEQ ID NO: 47684 - DNA, 25 bp, Artificial Sequence
  Synthetic: FXN 5 reverse 9:69036902-69036931; AsCpf1-1
ccttcctggcctttgcccagacggt

SEQ ID NO: 47685 - DNA, 18 bp, Artificial Sequence
  Synthetic: FXN 5 reverse 9:69036903-69036925; AsCpf1-1
gccttcctggcctttgcc

SEQ ID NO: 47686 - DNA, 19 bp, Artificial Sequence
  Synthetic: FXN 5 reverse 9:69036903-69036926; AsCpf1-1
gccttcctggcctttgccc

SEQ ID NO: 47687 - DNA, 20 bp, Artificial Sequence
  Synthetic: FXN 5 reverse 9:69036903-69036927; AsCpf1-1
gccttcctggcctttgccca

SEQ ID NO: 47688 - DNA, 21 bp, Artificial Sequence
  Synthetic: FXN 5 reverse 9:69036903-69036928; AsCpf1-1
gccttcctggcctttgcccag

SEQ ID NO: 47689 - DNA, 22 bp, Artificial Sequence
  Synthetic: FXN 5 reverse 9:69036903-69036929; AsCpf1-1
gccttcctggcctttgcccaga

SEQ ID NO: 47690 - DNA, 23 bp, Artificial Sequence
  Synthetic: FXN 5 reverse 9:69036903-69036930; AsCpf1-1
gccttcctggcctttgcccagac

SEQ ID NO: 47691 - DNA, 24 bp, Artificial Sequence
  Synthetic: FXN 5 reverse 9:69036903-69036931; AsCpf1-1
gccttcctggcctttgcccagacg

SEQ ID NO: 47692 - DNA, 25 bp, Artificial Sequence
  Synthetic: FXN 5 reverse 9:69036903-69036932; AsCpf1-1
gccttcctggcctttgcccagacgg

SEQ ID NO: 47693 - DNA, 18 bp, Artificial Sequence
  Synthetic: FXN 5 reverse 9:69036908-69036930; AsCpf1-1
cttccgccttcctggcct

SEQ ID NO: 47694 - DNA, 19 bp, Artificial Sequence
  Synthetic: FXN 5 reverse 9:69036908-69036931; AsCpf1-1
cttccgccttcctggcctt

SEQ ID NO: 47695 - DNA, 20 bp, Artificial Sequence
  Synthetic: FXN 5 reverse 9:69036908-69036932; AsCpf1-1
cttccgccttcctggccttt

SEQ ID NO: 47696 - DNA, 21 bp, Artificial Sequence
  Synthetic: FXN 5 reverse 9:69036908-69036933; AsCpf1-1
cttccgccttcctggcctttg

SEQ ID NO: 47697 - DNA, 22 bp, Artificial Sequence
  Synthetic: FXN 5 reverse 9:69036908-69036934; AsCpf1-1
cttccgccttcctggcctttgc

SEQ ID NO: 47698 - DNA, 23 bp, Artificial Sequence
  Synthetic: FXN 5 reverse 9:69036908-69036935; AsCpf1-1
cttccgccttcctggcctttgcc

SEQ ID NO: 47699 - DNA, 24 bp, Artificial Sequence
  Synthetic: FXN 5 reverse 9:69036908-69036936; AsCpf1-1
cttccgccttcctggcctttgccc

SEQ ID NO: 47700 - DNA, 25 bp, Artificial Sequence
  Synthetic: FXN 5 reverse 9:69036908-69036937; AsCpf1-1
cttccgccttcctggcctttgccca

SEQ ID NO: 47701 - DNA, 18 bp, Artificial Sequence
  Synthetic: FXN 5 forward 9:69036937-69036959; AsCpf1-1
ttcagagtggctggtacg

SEQ ID NO: 47702 - DNA, 19 bp, Artificial Sequence
  Synthetic: FXN 5 forward 9:69036937-69036960; AsCpf1-1
ttcagagtggctggtacgc

SEQ ID NO: 47703 - DNA, 20 bp, Artificial Sequence
  Synthetic: FXN 5 forward 9:69036937-69036961; AsCpf1-1
ttcagagtggctggtacgcc

SEQ ID NO: 47704 - DNA, 21 bp, Artificial Sequence
  Synthetic: FXN 5 forward 9:69036937-69036962; AsCpf1-1
ttcagagtggctggtacgccg

SEQ ID NO: 47705 - DNA, 22 bp, Artificial Sequence
  Synthetic: FXN 5 forward 9:69036937-69036963; AsCpf1-1
ttcagagtggctggtacgccgc

SEQ ID NO: 47706 - DNA, 23 bp, Artificial Sequence
  Synthetic: FXN 5 forward 9:69036937-69036964; AsCpf1-1
ttcagagtggctggtacgccgca

SEQ ID NO: 47707 - DNA, 24 bp, Artificial Sequence
  Synthetic: FXN 5 forward 9:69036937-69036965; AsCpf1-1
ttcagagtggctggtacgccgcat

SEQ ID NO: 47708 - DNA, 25 bp, Artificial Sequence
  Synthetic: FXN 5 forward 9:69036937-69036966; AsCpf1-1
ttcagagtggctggtacgccgcatg

SEQ ID NO: 47709 - DNA, 18 bp, Artificial Sequence
  Synthetic: FXN 5 forward 9:69036941-69036963; AsCpf1-1
gagtggctggtacgccgc

SEQ ID NO: 47710 - DNA, 19 bp, Artificial Sequence
  Synthetic: FXN 5 forward 9:69036941-69036964; AsCpf1-1
gagtggctggtacgccgca

SEQ ID NO: 47711 - DNA, 20 bp, Artificial Sequence
  Synthetic: FXN 5 forward 9:69036941-69036965; AsCpf1-1
gagtggctggtacgccgcat

SEQ ID NO: 47712 - DNA, 21 bp, Artificial Sequence
  Synthetic: FXN 5 forward 9:69036941-69036966; AsCpf1-1
gagtggctggtacgccgcatg

SEQ ID NO: 47713 - DNA, 22 bp, Artificial Sequence
  Synthetic: FXN 5 forward 9:69036941-69036967; AsCpf1-1
gagtggctggtacgccgcatgt

SEQ ID NO: 47714 - DNA, 23 bp, Artificial Sequence
  Synthetic: FXN 5 forward 9:69036941-69036968; AsCpf1-1
gagtggctggtacgccgcatgta

SEQ ID NO: 47715 - DNA, 24 bp, Artificial Sequence
  Synthetic: FXN 5 forward 9:69036941-69036969; AsCpf1-1
gagtggctggtacgccgcatgtat

SEQ ID NO: 47716 - DNA, 25 bp, Artificial Sequence
  Synthetic: FXN 5 forward 9:69036941-69036970; AsCpf1-1
gagtggctggtacgccgcatgtatt

SEQ ID NO: 47717 - DNA, 18 bp, Artificial Sequence
  Synthetic: FXN 5 reverse 9:69036947-69036969; AsCpf1-1
ctaatacatgcggcgtac

SEQ ID NO: 47718 - DNA, 19 bp, Artificial Sequence
  Synthetic: FXN 5 reverse 9:69036947-69036970; AsCpf1-1
ctaatacatgcggcgtacc

SEQ ID NO: 47719 - DNA, 20 bp, Artificial Sequence
  Synthetic: FXN 5 reverse 9:69036947-69036971; AsCpf1-1
ctaatacatgcggcgtacca

SEQ ID NO: 47720 - DNA, 21 bp, Artificial Sequence
  Synthetic: FXN 5 reverse 9:69036947-69036972; AsCpf1-1
ctaatacatgcggcgtaccag

SEQ ID NO: 47721 - DNA, 22 bp, Artificial Sequence
  Synthetic: FXN 5 reverse 9:69036947-69036973; AsCpf1-1
ctaatacatgcggcgtaccagc

SEQ ID NO: 47722 - DNA, 23 bp, Artificial Sequence
  Synthetic: FXN 5 reverse 9:69036947-69036974; AsCpf1-1
ctaatacatgcggcgtaccagcc

SEQ ID NO: 47723 - DNA, 24 bp, Artificial Sequence
  Synthetic: FXN 5 reverse 9:69036947-69036975; AsCpf1-1
ctaatacatgcggcgtaccagcca

SEQ ID NO: 47724 - DNA, 25 bp, Artificial Sequence
  Synthetic: FXN 5 reverse 9:69036947-69036976; AsCpf1-1
ctaatacatgcggcgtaccagccac

SEQ ID NO: 47725 - DNA, 18 bp, Artificial Sequence
  Synthetic: FXN 5 reverse 9:69036953-69036975; AsCpf1-1
tctcccctaatacatgcg

SEQ ID NO: 47726 - DNA, 19 bp, Artificial Sequence
  Synthetic: FXN 5 reverse 9:69036953-69036976; AsCpf1-1
tctcccctaatacatgcgg

SEQ ID NO: 47727 - DNA, 20 bp, Artificial Sequence
  Synthetic: FXN 5 reverse 9:69036953-69036977; AsCpf1-1
tctcccctaatacatgcggc

SEQ ID NO: 47728 - DNA, 21 bp, Artificial Sequence
  Synthetic: FXN 5 reverse 9:69036953-69036978; AsCpf1-1
tctcccctaatacatgcggcg

SEQ ID NO: 47729 - DNA, 22 bp, Artificial Sequence
  Synthetic: FXN 5 reverse 9:69036953-69036979; AsCpf1-1
tctcccctaatacatgcggcgt

SEQ ID NO: 47730 - DNA, 23 bp, Artificial Sequence
  Synthetic: FXN 5 reverse 9:69036953-69036980; AsCpf1-1
tctcccctaatacatgcggcgta

SEQ ID NO: 47731 - DNA, 24 bp, Artificial Sequence
  Synthetic: FXN 5 reverse 9:69036953-69036981; AsCpf1-1
tctcccctaatacatgcggcgtac

SEQ ID NO: 47732 - DNA, 25 bp, Artificial Sequence
  Synthetic: FXN 5 reverse 9:69036953-69036982; AsCpf1-1
tctcccctaatacatgcggcgtacc

SEQ ID NO: 47733 - DNA, 18 bp, Artificial Sequence
  Synthetic: FXN 5 forward 9:69036996-69037018; AsCpf1-1
agccatatttgtgttgct

SEQ ID NO: 47734 - DNA, 19 bp, Artificial Sequence
  Synthetic: FXN 5 forward 9:69036996-69037019; AsCpf1-1
agccatatttgtgttgctc

SEQ ID NO: 47735 - DNA, 20 bp, Artificial Sequence
  Synthetic: FXN 5 forward 9:69036996-69037020; AsCpf1-1
agccatatttgtgttgctct

SEQ ID NO: 47736 - DNA, 21 bp, Artificial Sequence
  Synthetic: FXN 5 forward 9:69036996-69037021; AsCpf1-1
agccatatttgtgttgctctc

SEQ ID NO: 47737 - DNA, 22 bp, Artificial Sequence
  Synthetic: FXN 5 forward 9:69036996-69037022; AsCpf1-1
agccatatttgtgttgctctcc

SEQ ID NO: 47738 - DNA, 23 bp, Artificial Sequence
  Synthetic: FXN 5 forward 9:69036996-69037023; AsCpf1-1
agccatatttgtgttgctctccg

SEQ ID NO: 47739 - DNA, 24 bp, Artificial Sequence
  Synthetic: FXN 5 forward 9:69036996-69037024; AsCpf1-1
agccatatttgtgttgctctccgg

SEQ ID NO: 47740 - DNA, 25 bp, Artificial Sequence
  Synthetic: FXN 5 forward 9:69036996-69037025; AsCpf1-1
agccatatttgtgttgctctccgga

SEQ ID NO: 47741 - DNA, 18 bp, Artificial Sequence
  Synthetic: FXN 5 reverse 9:69036996-69037018; AsCpf1-1
gagagcaacacaaatatg

SEQ ID NO: 47742 - DNA, 19 bp, Artificial Sequence
  Synthetic: FXN 5 reverse 9:69036996-69037019; AsCpf1-1
gagagcaacacaaatatgg

SEQ ID NO: 47743 - DNA, 20 bp, Artificial Sequence
  Synthetic: FXN 5 reverse 9:69036996-69037020; AsCpf1-1
gagagcaacacaaatatggc

SEQ ID NO: 47744 - DNA, 21 bp, Artificial Sequence
  Synthetic: FXN 5 reverse 9:69036996-69037021; AsCpf1-1
gagagcaacacaaatatggct

SEQ ID NO: 47745 - DNA, 22 bp, Artificial Sequence
  Synthetic: FXN 5 reverse 9:69036996-69037022; AsCpf1-1
gagagcaacacaaatatggctt

SEQ ID NO: 47746 - DNA, 23 bp, Artificial Sequence
  Synthetic: FXN 5 reverse 9:69036996-69037023; AsCpf1-1
gagagcaacacaaatatggcttg

SEQ ID NO: 47747 - DNA, 24 bp, Artificial Sequence
  Synthetic: FXN 5 reverse 9:69036996-69037024; AsCpf1-1
gagagcaacacaaatatggcttgg

SEQ ID NO: 47748 - DNA, 25 bp, Artificial Sequence
  Synthetic: FXN 5 reverse 9:69036996-69037025; AsCpf1-1
gagagcaacacaaatatggcttgga

SEQ ID NO: 47749 - DNA, 18 bp, Artificial Sequence
  Synthetic: FXN 5 reverse 9:69037016-69037038; AsCpf1-1
agcctaaagtacaaactc

SEQ ID NO: 47750 - DNA, 19 bp, Artificial Sequence
  Synthetic: FXN 5 reverse 9:69037016-69037039; AsCpf1-1
agcctaaagtacaaactcc

SEQ ID NO: 47751 - DNA, 20 bp, Artificial Sequence
  Synthetic: FXN 5 reverse 9:69037016-69037040; AsCpf1-1
agcctaaagtacaaactccg

SEQ ID NO: 47752 - DNA, 21 bp, Artificial Sequence
  Synthetic: FXN 5 reverse 9:69037016-69037041; AsCpf1-1
agcctaaagtacaaactccgg

SEQ ID NO: 47753 - DNA, 22 bp, Artificial Sequence
  Synthetic: FXN 5 reverse 9:69037016-69037042; AsCpf1-1
agcctaaagtacaaactccgga

SEQ ID NO: 47754 - DNA, 23 bp, Artificial Sequence
  Synthetic: FXN 5 reverse 9:69037016-69037043; AsCpf1-1
agcctaaagtacaaactccggag

SEQ ID NO: 47755 - DNA, 24 bp, Artificial Sequence
  Synthetic: FXN 5 reverse 9:69037016-69037044; AsCpf1-1
agcctaaagtacaaactccggaga

SEQ ID NO: 47756 - DNA, 25 bp, Artificial Sequence
  Synthetic: FXN 5 reverse 9:69037016-69037045; AsCpf1-1
agcctaaagtacaaactccggagag

SEQ ID NO: 47757 - DNA, 18 bp, Artificial Sequence
  Synthetic: FXN 5 forward 9:69037019-69037041; AsCpf1-1
gagtttgtactttaggct

SEQ ID NO: 47758 - DNA, 19 bp, Artificial Sequence
  Synthetic: FXN 5 forward 9:69037019-69037042; AsCpf1-1
gagtttgtactttaggctt

SEQ ID NO: 47759 - DNA, 20 bp, Artificial Sequence
  Synthetic: FXN 5 forward 9:69037019-69037043; AsCpf1-1
gagtttgtactttaggcttg

SEQ ID NO: 47760 - DNA, 21 bp, Artificial Sequence
  Synthetic: FXN 5 forward 9:69037019-69037044; AsCpf1-1
gagtttgtactttaggcttga

SEQ ID NO: 47761 - DNA, 22 bp, Artificial Sequence
  Synthetic: FXN 5 forward 9:69037019-69037045; AsCpf1-1
gagtttgtactttaggcttgaa

SEQ ID NO: 47762 - DNA, 23 bp, Artificial Sequence
  Synthetic: FXN 5 forward 9:69037019-69037046; AsCpf1-1
gagtttgtactttaggcttgaac

SEQ ID NO: 47763 - DNA, 24 bp, Artificial Sequence
  Synthetic: FXN 5 forward 9:69037019-69037047; AsCpf1-1
gagtttgtactttaggcttgaact

SEQ ID NO: 47764 - DNA, 25 bp, Artificial Sequence
  Synthetic: FXN 5 forward 9:69037019-69037048; AsCpf1-1
gagtttgtactttaggcttgaactt

SEQ ID NO: 47765 - DNA, 18 bp, Artificial Sequence
  Synthetic: FXN 5 forward 9:69037046-69037068; AsCpf1-1
cacacgtgttatttggcc

SEQ ID NO: 47766 - DNA, 19 bp, Artificial Sequence
  Synthetic: FXN 5 forward 9:69037046-69037069; AsCpf1-1
cacacgtgttatttggccc

SEQ ID NO: 47767 - DNA, 20 bp, Artificial Sequence
  Synthetic: FXN 5 forward 9:69037046-69037070; AsCpf1-1
cacacgtgttatttggccca

SEQ ID NO: 47768 - DNA, 21 bp, Artificial Sequence
  Synthetic: FXN 5 forward 9:69037046-69037071; AsCpf1-1
cacacgtgttatttggcccac

SEQ ID NO: 47769 - DNA, 22 bp, Artificial Sequence
  Synthetic: FXN 5 forward 9:69037046-69037072; AsCpf1-1
cacacgtgttatttggcccaca

SEQ ID NO: 47770 - DNA, 23 bp, Artificial Sequence
  Synthetic: FXN 5 forward 9:69037046-69037073; AsCpf1-1
cacacgtgttatttggcccacat

SEQ ID NO: 47771 - DNA, 24 bp, Artificial Sequence
  Synthetic: FXN 5 forward 9:69037046-69037074; AsCpf1-1
cacacgtgttatttggcccacatt

SEQ ID NO: 47772 - DNA, 25 bp, Artificial Sequence
  Synthetic: FXN 5 forward 9:69037046-69037075; AsCpf1-1
cacacgtgttatttggcccacattg

SEQ ID NO: 47773 - DNA, 18 bp, Artificial Sequence
  Synthetic: FXN 5 forward 9:69037047-69037069; AsCpf1-1
acacgtgttatttggccc

SEQ ID NO: 47774 - DNA, 19 bp, Artificial Sequence
  Synthetic: FXN 5 forward 9:69037047-69037070; AsCpf1-1
acacgtgttatttggccca

SEQ ID NO: 47775 - DNA, 20 bp, Artificial Sequence
  Synthetic: FXN 5 forward 9:69037047-69037071; AsCpf1-1
acacgtgttatttggcccac

SEQ ID NO: 47776 - DNA, 21 bp, Artificial Sequence
  Synthetic: FXN 5 forward 9:69037047-69037072; AsCpf1-1
acacgtgttatttggcccaca

SEQ ID NO: 47777 - DNA, 22 bp, Artificial Sequence
  Synthetic: FXN 5 forward 9:69037047-69037073; AsCpf1-1
acacgtgttatttggcccacat

SEQ ID NO: 47778 - DNA, 23 bp, Artificial Sequence
  Synthetic: FXN 5 forward 9:69037047-69037074; AsCpf1-1
acacgtgttatttggcccacatt

SEQ ID NO: 47779 - DNA, 24 bp, Artificial Sequence
  Synthetic: FXN 5 forward 9:69037047-69037075; AsCpf1-1
acacgtgttatttggcccacattg

SEQ ID NO: 47780 - DNA, 25 bp, Artificial Sequence
  Synthetic: FXN 5 forward 9:69037047-69037076; AsCpf1-1
acacgtgttatttggcccacattgt

SEQ ID NO: 47781 - DNA, 18 bp, Artificial Sequence
  Synthetic: FXN 5 reverse 9:69037054-69037076; AsCpf1-1
aacacaatgtgggccaaa

SEQ ID NO: 47782 - DNA, 19 bp, Artificial Sequence
  Synthetic: FXN 5 reverse 9:69037054-69037077; AsCpf1-1
aacacaatgtgggccaaat

SEQ ID NO: 47783 - DNA, 20 bp, Artificial Sequence
  Synthetic: FXN 5 reverse 9:69037054-69037078; AsCpf1-1
aacacaatgtgggccaaata

SEQ ID NO: 47784 - DNA, 21 bp, Artificial Sequence
  Synthetic: FXN 5 reverse 9:69037054-69037079; AsCpf1-1
aacacaatgtgggccaaataa

SEQ ID NO: 47785 - DNA, 22 bp, Artificial Sequence
  Synthetic: FXN 5 reverse 9:69037054-69037080; AsCpf1-1
aacacaatgtgggccaaataac

SEQ ID NO: 47786 - DNA, 23 bp, Artificial Sequence
  Synthetic: FXN 5 reverse 9:69037054-69037081; AsCpf1-1
aacacaatgtgggccaaataaca

SEQ ID NO: 47787 - DNA, 24 bp, Artificial Sequence
  Synthetic: FXN 5 reverse 9:69037054-69037082; AsCpf1-1
aacacaatgtgggccaaataacac

SEQ ID NO: 47788 - DNA, 25 bp, Artificial Sequence
  Synthetic: FXN 5 reverse 9:69037054-69037083; AsCpf1-1
aacacaatgtgggccaaataacacg

SEQ ID NO: 47789 - DNA, 18 bp, Artificial Sequence
  Synthetic: FXN 5 reverse 9:69037066-69037088; AsCpf1-1
aaagtttcttcaaacaca

SEQ ID NO: 47790 - DNA, 19 bp, Artificial Sequence
  Synthetic: FXN 5 reverse 9:69037066-69037089; AsCpf1-1
aaagtttcttcaaacacaa

SEQ ID NO: 47791 - DNA, 20 bp, Artificial Sequence
  Synthetic: FXN 5 reverse 9:69037066-69037090; AsCpf1-1
aaagtttcttcaaacacaat

SEQ ID NO: 47792 - DNA, 21 bp, Artificial Sequence
  Synthetic: FXN 5 reverse 9:69037066-69037091; AsCpf1-1
aaagtttcttcaaacacaatg

SEQ ID NO: 47793 - DNA, 22 bp, Artificial Sequence
  Synthetic: FXN 5 reverse 9:69037066-69037092; AsCpf1-1
aaagtttcttcaaacacaatgt

SEQ ID NO: 47794 - DNA, 23 bp, Artificial Sequence
  Synthetic: FXN 5 reverse 9:69037066-69037093; AsCpf1-1
aaagtttcttcaaacacaatgtg

SEQ ID NO: 47795 - DNA, 24 bp, Artificial Sequence
  Synthetic: FXN 5 reverse 9:69037066-69037094; AsCpf1-1
aaagtttcttcaaacacaatgtgg

SEQ ID NO: 47796 - DNA, 25 bp, Artificial Sequence
  Synthetic: FXN 5 reverse 9:69037066-69037095; AsCpf1-1
aaagtttcttcaaacacaatgtggg

SEQ ID NO: 47797 - DNA, 18 bp, Artificial Sequence
  Synthetic: FXN 5 reverse 9:69037106-69037128; AsCpf1-1
ttttctaagtcctaactt

SEQ ID NO: 47798 - DNA, 19 bp, Artificial Sequence
  Synthetic: FXN 5 reverse 9:69037106-69037129; AsCpf1-1
ttttctaagtcctaacttt

SEQ ID NO: 47799 - DNA, 20 bp, Artificial Sequence
  Synthetic: FXN 5 reverse 9:69037106-69037130; AsCpf1-1
ttttctaagtcctaactttt

SEQ ID NO: 47800 - DNA, 21 bp, Artificial Sequence
  Synthetic: FXN 5 reverse 9:69037106-69037131; AsCpf1-1
ttttctaagtcctaactttta

SEQ ID NO: 47801 - DNA, 22 bp, Artificial Sequence
  Synthetic: FXN 5 reverse 9:69037106-69037132; AsCpf1-1
ttttctaagtcctaacttttaa

SEQ ID NO: 47802 - DNA, 23 bp, Artificial Sequence
  Synthetic: FXN 5 reverse 9:69037106-69037133; AsCpf1-1
ttttctaagtcctaacttttaag

SEQ ID NO: 47803 - DNA, 24 bp, Artificial Sequence
  Synthetic: FXN 5 reverse 9:69037106-69037134; AsCpf1-1
ttttctaagtcctaacttttaagc

SEQ ID NO: 47804 - DNA, 25 bp, Artificial Sequence
  Synthetic: FXN 5 reverse 9:69037106-69037135; AsCpf1-1
ttttctaagtcctaacttttaagca

SEQ ID NO: 47805 - DNA, 18 bp, Artificial Sequence
  Synthetic: FXN 5 forward 9:69037136-69037158; AsCpf1-1
tggcaggacgcggtggct

SEQ ID NO: 47806 - DNA, 19 bp, Artificial Sequence
  Synthetic: FXN 5 forward 9:69037136-69037159; AsCpf1-1
tggcaggacgcggtggctc

SEQ ID NO: 47807 - DNA, 20 bp, Artificial Sequence
  Synthetic: FXN 5 forward 9:69037136-69037160; AsCpf1-1
tggcaggacgcggtggctca

SEQ ID NO: 47808 - DNA, 21 bp, Artificial Sequence
  Synthetic: FXN 5 forward 9:69037136-69037161; AsCpf1-1
tggcaggacgcggtggctcat

SEQ ID NO: 47809 - DNA, 22 bp, Artificial Sequence
  Synthetic: FXN 5 forward 9:69037136-69037162; AsCpf1-1
tggcaggacgcggtggctcatg

SEQ ID NO: 47810 - DNA, 23 bp, Artificial Sequence
  Synthetic: FXN 5 forward 9:69037136-69037163; AsCpf1-1
tggcaggacgcggtggctcatgc

SEQ ID NO: 47811 - DNA, 24 bp, Artificial Sequence
  Synthetic: FXN 5 forward 9:69037136-69037164; AsCpf1-1
tggcaggacgcggtggctcatgcc

SEQ ID NO: 47812 - DNA, 25 bp, Artificial Sequence
  Synthetic: FXN 5 forward 9:69037136-69037165; AsCpf1-1
tggcaggacgcggtggctcatgccc

SEQ ID NO: 47813 - DNA, 18 bp, Artificial Sequence
  Synthetic: FXN 5 reverse 9:69037156-69037178; AsCpf1-1
aaagtgctgagattatgg

SEQ ID NO: 47814 - DNA, 19 bp, Artificial Sequence
  Synthetic: FXN 5 reverse 9:69037156-69037179; AsCpf1-1
aaagtgctgagattatggg

SEQ ID NO: 47815 - DNA, 20 bp, Artificial Sequence
  Synthetic: FXN 5 reverse 9:69037156-69037180; AsCpf1-1
aaagtgctgagattatgggc

SEQ ID NO: 47816 - DNA, 21 bp, Artificial Sequence
  Synthetic: FXN 5 reverse 9:69037156-69037181; AsCpf1-1
aaagtgctgagattatgggca

SEQ ID NO: 47817 - DNA, 22 bp, Artificial Sequence
  Synthetic: FXN 5 reverse 9:69037156-69037182; AsCpf1-1
aaagtgctgagattatgggcat

SEQ ID NO: 47818 - DNA, 23 bp, Artificial Sequence
  Synthetic: FXN 5 reverse 9:69037156-69037183; AsCpf1-1
aaagtgctgagattatgggcatg

SEQ ID NO: 47819 - DNA, 24 bp, Artificial Sequence
  Synthetic: FXN 5 reverse 9:69037156-69037184; AsCpf1-1
aaagtgctgagattatgggcatga

SEQ ID NO: 47820 - DNA, 25 bp, Artificial Sequence
  Synthetic: FXN 5 reverse 9:69037156-69037185; AsCpf1-1
aaagtgctgagattatgggcatgag

SEQ ID NO: 47821 - DNA, 18 bp, Artificial Sequence
  Synthetic: FXN 5 reverse 9:69037166-69037188; AsCpf1-1
taggcctcccaaagtgct

SEQ ID NO: 47822 - DNA, 19 bp, Artificial Sequence
  Synthetic: FXN 5 reverse 9:69037166-69037189; AsCpf1-1
taggcctcccaaagtgctg

SEQ ID NO: 47823 - DNA, 20 bp, Artificial Sequence
  Synthetic: FXN 5 reverse 9:69037166-69037190; AsCpf1-1
taggcctcccaaagtgctga

SEQ ID NO: 47824 - DNA, 21 bp, Artificial Sequence
  Synthetic: FXN 5 reverse 9:69037166-69037191; AsCpf1-1
taggcctcccaaagtgctgag

SEQ ID NO: 47825 - DNA, 22 bp, Artificial Sequence
  Synthetic: FXN 5 reverse 9:69037166-69037192; AsCpf1-1
taggcctcccaaagtgctgaga

SEQ ID NO: 47826 - DNA, 23 bp, Artificial Sequence
  Synthetic: FXN 5 reverse 9:69037166-69037193; AsCpf1-1
taggcctcccaaagtgctgagat

SEQ ID NO: 47827 - DNA, 24 bp, Artificial Sequence
  Synthetic: FXN 5 reverse 9:69037166-69037194; AsCpf1-1
taggcctcccaaagtgctgagatt

SEQ ID NO: 47828 - DNA, 25 bp, Artificial Sequence
  Synthetic: FXN 5 reverse 9:69037166-69037195; AsCpf1-1
taggcctcccaaagtgctgagatta

SEQ ID NO: 47829 - DNA, 18 bp, Artificial Sequence
  Synthetic: FXN 5 reverse 9:69037172-69037194; AsCpf1-1
ccttcctaggcctcccaa

SEQ ID NO: 47830 - DNA, 19 bp, Artificial Sequence
  Synthetic: FXN 5 reverse 9:69037172-69037195; AsCpf1-1
ccttcctaggcctcccaaa

SEQ ID NO: 47831 - DNA, 20 bp, Artificial Sequence
  Synthetic: FXN 5 reverse 9:69037172-69037196; AsCpf1-1
ccttcctaggcctcccaaag

SEQ ID NO: 47832 - DNA, 21 bp, Artificial Sequence
  Synthetic: FXN 5 reverse 9:69037172-69037197; AsCpf1-1
ccttcctaggcctcccaaagt

SEQ ID NO: 47833 - DNA, 22 bp, Artificial Sequence
  Synthetic: FXN 5 reverse 9:69037172-69037198; AsCpf1-1
ccttcctaggcctcccaaagtg

SEQ ID NO: 47834 - DNA, 23 bp, Artificial Sequence
  Synthetic: FXN 5 reverse 9:69037172-69037199; AsCpf1-1
ccttcctaggcctcccaaagtgc

SEQ ID NO: 47835 - DNA, 24 bp, Artificial Sequence
  Synthetic: FXN 5 reverse 9:69037172-69037200; AsCpf1-1
ccttcctaggcctcccaaagtgct

SEQ ID NO: 47836 - DNA, 25 bp, Artificial Sequence
  Synthetic: FXN 5 reverse 9:69037172-69037201; AsCpf1-1
ccttcctaggcctcccaaagtgctg

SEQ ID NO: 47837 - DNA, 18 bp, Artificial Sequence
  Synthetic: FXN 5 reverse 9:69037188-69037210; AsCpf1-1
gacctcaggtgatccacc

SEQ ID NO: 47838 - DNA, 19 bp, Artificial Sequence
  Synthetic: FXN 5 reverse 9:69037188-69037211; AsCpf1-1
gacctcaggtgatccacct

SEQ ID NO: 47839 - DNA, 20 bp, Artificial Sequence
  Synthetic: FXN 5 reverse 9:69037188-69037212; AsCpf1-1
gacctcaggtgatccacctt

SEQ ID NO: 47840 - DNA, 21 bp, Artificial Sequence
  Synthetic: FXN 5 reverse 9:69037188-69037213; AsCpf1-1
gacctcaggtgatccaccttc

SEQ ID NO: 47841 - DNA, 22 bp, Artificial Sequence
  Synthetic: FXN 5 reverse 9:69037188-69037214; AsCpf1-1
gacctcaggtgatccaccttcc

SEQ ID NO: 47842 - DNA, 23 bp, Artificial Sequence
  Synthetic: FXN 5 reverse 9:69037188-69037215; AsCpf1-1
gacctcaggtgatccaccttcct

SEQ ID NO: 47843 - DNA, 24 bp, Artificial Sequence
  Synthetic: FXN 5 reverse 9:69037188-69037216; AsCpf1-1
gacctcaggtgatccaccttccta

SEQ ID NO: 47844 - DNA, 25 bp, Artificial Sequence
  Synthetic: FXN 5 reverse 9:69037188-69037217; AsCpf1-1
gacctcaggtgatccaccttcctag

SEQ ID NO: 47845 - DNA, 18 bp, Artificial Sequence
  Synthetic: FXN 5 forward 9:69037211-69037233; AsCpf1-1
gagttcaagactaacctg

SEQ ID NO: 47846 - DNA, 19 bp, Artificial Sequence
  Synthetic: FXN 5 forward 9:69037211-69037234; AsCpf1-1
gagttcaagactaacctgg

SEQ ID NO: 47847 - DNA, 20 bp, Artificial Sequence
  Synthetic: FXN 5 forward 9:69037211-69037235; AsCpf1-1
gagttcaagactaacctggc

SEQ ID NO: 47848 - DNA, 21 bp, Artificial Sequence
  Synthetic: FXN 5 forward 9:69037211-69037236; AsCpf1-1
gagttcaagactaacctggcc

SEQ ID NO: 47849 - DNA, 22 bp, Artificial Sequence
  Synthetic: FXN 5 forward 9:69037211-69037237; AsCpf1-1
gagttcaagactaacctggcca

SEQ ID NO: 47850 - DNA, 23 bp, Artificial Sequence
  Synthetic: FXN 5 forward 9:69037211-69037238; AsCpf1-1
gagttcaagactaacctggccaa

SEQ ID NO: 47851 - DNA, 24 bp, Artificial Sequence
  Synthetic: FXN 5 forward 9:69037211-69037239; AsCpf1-1
gagttcaagactaacctggccaac

SEQ ID NO: 47852 - DNA, 25 bp, Artificial Sequence
  Synthetic: FXN 5 forward 9:69037211-69037240; AsCpf1-1
gagttcaagactaacctggccaaca

SEQ ID NO: 47853 - DNA, 18 bp, Artificial Sequence
  Synthetic: FXN 5 forward 9:69037218-69037240; AsCpf1-1
agactaacctggccaaca

SEQ ID NO: 47854 - DNA, 19 bp, Artificial Sequence
  Synthetic: FXN 5 forward 9:69037218-69037241; AsCpf1-1
agactaacctggccaacat

SEQ ID NO: 47855 - DNA, 20 bp, Artificial Sequence
  Synthetic: FXN 5 forward 9:69037218-69037242; AsCpf1-1
agactaacctggccaacatg

SEQ ID NO: 47856 - DNA, 21 bp, Artificial Sequence
  Synthetic: FXN 5 forward 9:69037218-69037243; AsCpf1-1
agactaacctggccaacatgg

SEQ ID NO: 47857 - DNA, 22 bp, Artificial Sequence
  Synthetic: FXN 5 forward 9:69037218-69037244; AsCpf1-1
agactaacctggccaacatggt

SEQ ID NO: 47858 - DNA, 23 bp, Artificial Sequence
  Synthetic: FXN 5 forward 9:69037218-69037245; AsCpf1-1
agactaacctggccaacatggtg

SEQ ID NO: 47859 - DNA, 24 bp, Artificial Sequence
  Synthetic: FXN 5 forward 9:69037218-69037246; AsCpf1-1
agactaacctggccaacatggtga

SEQ ID NO: 47860 - DNA, 25 bp, Artificial Sequence
  Synthetic: FXN 5 forward 9:69037218-69037247; AsCpf1-1
agactaacctggccaacatggtgaa

SEQ ID NO: 47861 - DNA, 18 bp, Artificial Sequence
  Synthetic: FXN 5 reverse 9:69037218-69037240; AsCpf1-1
ccatgttggccaggttag

SEQ ID NO: 47862 - DNA, 19 bp, Artificial Sequence
  Synthetic: FXN 5 reverse 9:69037218-69037241; AsCpf1-1
ccatgttggccaggttagt

SEQ ID NO: 47863 - DNA, 20 bp, Artificial Sequence
  Synthetic: FXN 5 reverse 9:69037218-69037242; AsCpf1-1
ccatgttggccaggttagtc

SEQ ID NO: 47864 - DNA, 21 bp, Artificial Sequence
  Synthetic: FXN 5 reverse 9:69037218-69037243; AsCpf1-1
ccatgttggccaggttagtct

SEQ ID NO: 47865 - DNA, 22 bp, Artificial Sequence
  Synthetic: FXN 5 reverse 9:69037218-69037244; AsCpf1-1
ccatgttggccaggttagtctt

SEQ ID NO: 47866 - DNA, 23 bp, Artificial Sequence
  Synthetic: FXN 5 reverse 9:69037218-69037245; AsCpf1-1
ccatgttggccaggttagtcttg

SEQ ID NO: 47867 - DNA, 24 bp, Artificial Sequence
  Synthetic: FXN 5 reverse 9:69037218-69037246; AsCpf1-1
ccatgttggccaggttagtcttga

SEQ ID NO: 47868 - DNA, 25 bp, Artificial Sequence
  Synthetic: FXN 5 reverse 9:69037218-69037247; AsCpf1-1
ccatgttggccaggttagtcttgaa

SEQ ID NO: 47869 - DNA, 18 bp, Artificial Sequence
  Synthetic: FXN 5 forward 9:69035952-69035974; AsCpf1-2
cgcgccgggaacagccgc

SEQ ID NO: 47870 - DNA, 19 bp, Artificial Sequence
  Synthetic: FXN 5 forward 9:69035952-69035975; AsCpf1-2
cgcgccgggaacagccgcg

SEQ ID NO: 47871 - DNA, 20 bp, Artificial Sequence
  Synthetic: FXN 5 forward 9:69035952-69035976; AsCpf1-2
cgcgccgggaacagccgcgg

SEQ ID NO: 47872 - DNA, 21 bp, Artificial Sequence
  Synthetic: FXN 5 forward 9:69035952-69035977; AsCpf1-2
cgcgccgggaacagccgcggg

SEQ ID NO: 47873 - DNA, 22 bp, Artificial Sequence
  Synthetic: FXN 5 forward 9:69035952-69035978; AsCpf1-2
cgcgccgggaacagccgcgggc

SEQ ID NO: 47874 - DNA, 23 bp, Artificial Sequence
  Synthetic: FXN 5 forward 9:69035952-69035979; AsCpf1-2
cgcgccgggaacagccgcgggcc

SEQ ID NO: 47875 - DNA, 24 bp, Artificial Sequence
  Synthetic: FXN 5 forward 9:69035952-69035980; AsCpf1-2
cgcgccgggaacagccgcgggccg

SEQ ID NO: 47876 - DNA, 25 bp, Artificial Sequence
  Synthetic: FXN 5 forward 9:69035952-69035981; AsCpf1-2
cgcgccgggaacagccgcgggccgc

SEQ ID NO: 47877 - DNA, 18 bp, Artificial Sequence
  Synthetic: FXN 5 reverse 9:69036263-69036285; AsCpf1-2
gcagagaagtgacaagca

SEQ ID NO: 47878 - DNA, 19 bp, Artificial Sequence
  Synthetic: FXN 5 reverse 9:69036263-69036286; AsCpf1-2
gcagagaagtgacaagcat

SEQ ID NO: 47879 - DNA, 20 bp, Artificial Sequence
  Synthetic: FXN 5 reverse 9:69036263-69036287; AsCpf1-2
gcagagaagtgacaagcatg

SEQ ID NO: 47880 - DNA, 21 bp, Artificial Sequence
  Synthetic: FXN 5 reverse 9:69036263-69036288; AsCpf1-2
gcagagaagtgacaagcatgg

SEQ ID NO: 47881 - DNA, 22 bp, Artificial Sequence
  Synthetic: FXN 5 reverse 9:69036263-69036289; AsCpf1-2
gcagagaagtgacaagcatgga

SEQ ID NO: 47882 - DNA, 23 bp, Artificial Sequence
  Synthetic: FXN 5 reverse 9:69036263-69036290; AsCpf1-2
gcagagaagtgacaagcatggag

SEQ ID NO: 47883 - DNA, 24 bp, Artificial Sequence
  Synthetic: FXN 5 reverse 9:69036263-69036291; AsCpf1-2
gcagagaagtgacaagcatggaga

SEQ ID NO: 47884 - DNA, 25 bp, Artificial Sequence
  Synthetic: FXN 5 reverse 9:69036263-69036292; AsCpf1-2
gcagagaagtgacaagcatggagac

SEQ ID NO: 47885 - DNA, 18 bp, Artificial Sequence
  Synthetic: FXN 5 reverse 9:69036304-69036326; AsCpf1-2
ctagcagataccatctat

SEQ ID NO: 47886 - DNA, 19 bp, Artificial Sequence
  Synthetic: FXN 5 reverse 9:69036304-69036327; AsCpf1-2
ctagcagataccatctatt

SEQ ID NO: 47887 - DNA, 20 bp, Artificial Sequence
  Synthetic: FXN 5 reverse 9:69036304-69036328; AsCpf1-2
ctagcagataccatctatta

SEQ ID NO: 47888 - DNA, 21 bp, Artificial Sequence
  Synthetic: FXN 5 reverse 9:69036304-69036329; AsCpf1-2
ctagcagataccatctattaa

SEQ ID NO: 47889 - DNA, 22 bp, Artificial Sequence
  Synthetic: FXN 5 reverse 9:69036304-69036330; AsCpf1-2
ctagcagataccatctattaat

SEQ ID NO: 47890 - DNA, 23 bp, Artificial Sequence
  Synthetic: FXN 5 reverse 9:69036304-69036331; AsCpf1-2
ctagcagataccatctattaata

SEQ ID NO: 47891 - DNA, 24 bp, Artificial Sequence
  Synthetic: FXN 5 reverse 9:69036304-69036332; AsCpf1-2
ctagcagataccatctattaatat

SEQ ID NO: 47892 - DNA, 25 bp, Artificial Sequence
  Synthetic: FXN 5 reverse 9:69036304-69036333; AsCpf1-2
ctagcagataccatctattaatatt

SEQ ID NO: 47893 - DNA, 18 bp, Artificial Sequence
  Synthetic: FXN 5 reverse 9:69036306-69036328; AsCpf1-2
tactagcagataccatct

SEQ ID NO: 47894 - DNA, 19 bp, Artificial Sequence
  Synthetic: FXN 5 reverse 9:69036306-69036329; AsCpf1-2
tactagcagataccatcta

SEQ ID NO: 47895 - DNA, 20 bp, Artificial Sequence
  Synthetic: FXN 5 reverse 9:69036306-69036330; AsCpf1-2
tactagcagataccatctat

SEQ ID NO: 47896 - DNA, 21 bp, Artificial Sequence
  Synthetic: FXN 5 reverse 9:69036306-69036331; AsCpf1-2
tactagcagataccatctatt

SEQ ID NO: 47897 - DNA, 22 bp, Artificial Sequence
  Synthetic: FXN 5 reverse 9:69036306-69036332; AsCpf1-2
tactagcagataccatctatta

SEQ ID NO: 47898 - DNA, 23 bp, Artificial Sequence
  Synthetic: FXN 5 reverse 9:69036306-69036333; AsCpf1-2
tactagcagataccatctattaa

SEQ ID NO: 47899 - DNA, 24 bp, Artificial Sequence
  Synthetic: FXN 5 reverse 9:69036306-69036334; AsCpf1-2
tactagcagataccatctattaat

SEQ ID NO: 47900 - DNA, 25 bp, Artificial Sequence
  Synthetic: FXN 5 reverse 9:69036306-69036335; AsCpf1-2
tactagcagataccatctattaata

SEQ ID NO: 47901 - DNA, 18 bp, Artificial Sequence
  Synthetic: FXN 5 reverse 9:69036310-69036332; AsCpf1-2
tatatactagcagatacc

SEQ ID NO: 47902 - DNA, 19 bp, Artificial Sequence
  Synthetic: FXN 5 reverse 9:69036310-69036333; AsCpf1-2
tatatactagcagatacca

SEQ ID NO: 47903 - DNA, 20 bp, Artificial Sequence
  Synthetic: FXN 5 reverse 9:69036310-69036334; AsCpf1-2
tatatactagcagataccat

SEQ ID NO: 47904 - DNA, 21 bp, Artificial Sequence
  Synthetic: FXN 5 reverse 9:69036310-69036335; AsCpf1-2
tatatactagcagataccatc

SEQ ID NO: 47905 - DNA, 22 bp, Artificial Sequence
  Synthetic: FXN 5 reverse 9:69036310-69036336; AsCpf1-2
tatatactagcagataccatct

SEQ ID NO: 47906 - DNA, 23 bp, Artificial Sequence
  Synthetic: FXN 5 reverse 9:69036310-69036337; AsCpf1-2
tatatactagcagataccatcta

SEQ ID NO: 47907 - DNA, 24 bp, Artificial Sequence
  Synthetic: FXN 5 reverse 9:69036310-69036338; AsCpf1-2
tatatactagcagataccatctat

SEQ ID NO: 47908 - DNA, 25 bp, Artificial Sequence
  Synthetic: FXN 5 reverse 9:69036310-69036339; AsCpf1-2
tatatactagcagataccatctatt

SEQ ID NO: 47909 - DNA, 18 bp, Artificial Sequence
  Synthetic: FXN 5 reverse 9:69036316-69036338; AsCpf1-2
tgtatgtatatactagca

SEQ ID NO: 47910 - DNA, 19 bp, Artificial Sequence
  Synthetic: FXN 5 reverse 9:69036316-69036339; AsCpf1-2
tgtatgtatatactagcag

SEQ ID NO: 47911 - DNA, 20 bp, Artificial Sequence
  Synthetic: FXN 5 reverse 9:69036316-69036340; AsCpf1-2
tgtatgtatatactagcaga

SEQ ID NO: 47912 - DNA, 21 bp, Artificial Sequence
  Synthetic: FXN 5 reverse 9:69036316-69036341; AsCpf1-2
tgtatgtatatactagcagat

SEQ ID NO: 47913 - DNA, 22 bp, Artificial Sequence
  Synthetic: FXN 5 reverse 9:69036316-69036342; AsCpf1-2
tgtatgtatatactagcagata

SEQ ID NO: 47914 - DNA, 23 bp, Artificial Sequence
  Synthetic: FXN 5 reverse 9:69036316-69036343; AsCpf1-2
tgtatgtatatactagcagatac

SEQ ID NO: 47915 - DNA, 24 bp, Artificial Sequence
  Synthetic: FXN 5 reverse 9:69036316-69036344; AsCpf1-2
tgtatgtatatactagcagatacc

SEQ ID NO: 47916 - DNA, 25 bp, Artificial Sequence
  Synthetic: FXN 5 reverse 9:69036316-69036345; AsCpf1-2
tgtatgtatatactagcagatacca

SEQ ID NO: 47917 - DNA, 18 bp, Artificial Sequence
  Synthetic: FXN 5 forward 9:69036319-69036341; AsCpf1-2
tgctagtatatacataca

SEQ ID NO: 47918 - DNA, 19 bp, Artificial Sequence
  Synthetic: FXN 5 forward 9:69036319-69036342; AsCpf1-2
tgctagtatatacatacac

SEQ ID NO: 47919 - DNA, 20 bp, Artificial Sequence
  Synthetic: FXN 5 forward 9:69036319-69036343; AsCpf1-2
tgctagtatatacatacaca

SEQ ID NO: 47920 - DNA, 21 bp, Artificial Sequence
  Synthetic: FXN 5 forward 9:69036319-69036344; AsCpf1-2
tgctagtatatacatacacat

SEQ ID NO: 47921 - DNA, 22 bp, Artificial Sequence
  Synthetic: FXN 5 forward 9:69036319-69036345; AsCpf1-2
tgctagtatatacatacacata

SEQ ID NO: 47922 - DNA, 23 bp, Artificial Sequence
  Synthetic: FXN 5 forward 9:69036319-69036346; AsCpf1-2
tgctagtatatacatacacataa

SEQ ID NO: 47923 - DNA, 24 bp, Artificial Sequence
  Synthetic: FXN 5 forward 9:69036319-69036347; AsCpf1-2
tgctagtatatacatacacataat

SEQ ID NO: 47924 - DNA, 25 bp, Artificial Sequence
  Synthetic: FXN 5 forward 9:69036319-69036348; AsCpf1-2
tgctagtatatacatacacataatg

SEQ ID NO: 47925 - DNA, 18 bp, Artificial Sequence
  Synthetic: FXN 5 forward 9:69036329-69036351; AsCpf1-2
tacatacacataatgtgt

SEQ ID NO: 47926 - DNA, 19 bp, Artificial Sequence
  Synthetic: FXN 5 forward 9:69036329-69036352; AsCpf1-2
tacatacacataatgtgtg

SEQ ID NO: 47927 - DNA, 20 bp, Artificial Sequence
  Synthetic: FXN 5 forward 9:69036329-69036353; AsCpf1-2
tacatacacataatgtgtgt

SEQ ID NO: 47928 - DNA, 21 bp, Artificial Sequence
  Synthetic: FXN 5 forward 9:69036329-69036354; AsCpf1-2
tacatacacataatgtgtgtg

SEQ ID NO: 47929 - DNA, 22 bp, Artificial Sequence
  Synthetic: FXN 5 forward 9:69036329-69036355; AsCpf1-2
tacatacacataatgtgtgtgt

SEQ ID NO: 47930 - DNA, 23 bp, Artificial Sequence
  Synthetic: FXN 5 forward 9:69036329-69036356; AsCpf1-2
tacatacacataatgtgtgtgtc

SEQ ID NO: 47931 - DNA, 24 bp, Artificial Sequence
  Synthetic: FXN 5 forward 9:69036329-69036357; AsCpf1-2
tacatacacataatgtgtgtgtct

SEQ ID NO: 47932 - DNA, 25 bp, Artificial Sequence
  Synthetic: FXN 5 forward 9:69036329-69036358; AsCpf1-2
tacatacacataatgtgtgtgtctg

SEQ ID NO: 47933 - DNA, 18 bp, Artificial Sequence
  Synthetic: FXN 5 forward 9:69036331-69036353; AsCpf1-2
catacacataatgtgtgt

SEQ ID NO: 47934 - DNA, 19 bp, Artificial Sequence
  Synthetic: FXN 5 forward 9:69036331-69036354; AsCpf1-2
catacacataatgtgtgtg

SEQ ID NO: 47935 - DNA, 20 bp, Artificial Sequence
  Synthetic: FXN 5 forward 9:69036331-69036355; AsCpf1-2
catacacataatgtgtgtgt

SEQ ID NO: 47936 - DNA, 21 bp, Artificial Sequence
  Synthetic: FXN 5 forward 9:69036331-69036356; AsCpf1-2
catacacataatgtgtgtgtc

SEQ ID NO: 47937 - DNA, 22 bp, Artificial Sequence
  Synthetic: FXN 5 forward 9:69036331-69036357; AsCpf1-2
catacacataatgtgtgtgtct

SEQ ID NO: 47938 - DNA, 23 bp, Artificial Sequence
  Synthetic: FXN 5 forward 9:69036331-69036358; AsCpf1-2
catacacataatgtgtgtgtctg

SEQ ID NO: 47939 - DNA, 24 bp, Artificial Sequence
  Synthetic: FXN 5 forward 9:69036331-69036359; AsCpf1-2
catacacataatgtgtgtgtctgt

SEQ ID NO: 47940 - DNA, 25 bp, Artificial Sequence
  Synthetic: FXN 5 forward 9:69036331-69036360; AsCpf1-2
catacacataatgtgtgtgtctgtg

SEQ ID NO: 47941 - DNA, 18 bp, Artificial Sequence
  Synthetic: FXN 5 reverse 9:69036343-69036365; AsCpf1-2
cagatacacacagacaca

SEQ ID NO: 47942 - DNA, 19 bp, Artificial Sequence
  Synthetic: FXN 5 reverse 9:69036343-69036366; AsCpf1-2
cagatacacacagacacac

SEQ ID NO: 47943 - DNA, 20 bp, Artificial Sequence
  Synthetic: FXN 5 reverse 9:69036343-69036367; AsCpf1-2
cagatacacacagacacaca

SEQ ID NO: 47944 - DNA, 21 bp, Artificial Sequence
  Synthetic: FXN 5 reverse 9:69036343-69036368; AsCpf1-2
cagatacacacagacacacac

SEQ ID NO: 47945 - DNA, 22 bp, Artificial Sequence
  Synthetic: FXN 5 reverse 9:69036343-69036369; AsCpf1-2
cagatacacacagacacacaca

SEQ ID NO: 47946 - DNA, 23 bp, Artificial Sequence
  Synthetic: FXN 5 reverse 9:69036343-69036370; AsCpf1-2
cagatacacacagacacacacat

SEQ ID NO: 47947 - DNA, 24 bp, Artificial Sequence
  Synthetic: FXN 5 reverse 9:69036343-69036371; AsCpf1-2
cagatacacacagacacacacatt

SEQ ID NO: 47948 - DNA, 25 bp, Artificial Sequence
  Synthetic: FXN 5 reverse 9:69036343-69036372; AsCpf1-2
cagatacacacagacacacacatta

SEQ ID NO: 47949 - DNA, 18 bp, Artificial Sequence
  Synthetic: FXN 5 reverse 9:69036345-69036367; AsCpf1-2
tacagatacacacagaca

SEQ ID NO: 47950 - DNA, 19 bp, Artificial Sequence
  Synthetic: FXN 5 reverse 9:69036345-69036368; AsCpf1-2
tacagatacacacagacac

SEQ ID NO: 47951 - DNA, 20 bp, Artificial Sequence
  Synthetic: FXN 5 reverse 9:69036345-69036369; AsCpf1-2
tacagatacacacagacaca

SEQ ID NO: 47952 - DNA, 21 bp, Artificial Sequence
  Synthetic: FXN 5 reverse 9:69036345-69036370; AsCpf1-2
tacagatacacacagacacac

SEQ ID NO: 47953 - DNA, 22 bp, Artificial Sequence
  Synthetic: FXN 5 reverse 9:69036345-69036371; AsCpf1-2
tacagatacacacagacacaca

SEQ ID NO: 47954 - DNA, 23 bp, Artificial Sequence
  Synthetic: FXN 5 reverse 9:69036345-69036372; AsCpf1-2
tacagatacacacagacacacac

SEQ ID NO: 47955 - DNA, 24 bp, Artificial Sequence
  Synthetic: FXN 5 reverse 9:69036345-69036373; AsCpf1-2
tacagatacacacagacacacaca

SEQ ID NO: 47956 - DNA, 25 bp, Artificial Sequence
  Synthetic: FXN 5 reverse 9:69036345-69036374; AsCpf1-2
tacagatacacacagacacacacat

SEQ ID NO: 47957 - DNA, 18 bp, Artificial Sequence
  Synthetic: FXN 5 forward 9:69036362-69036384; AsCpf1-2
tgtatatagcgtgtgtgt

SEQ ID NO: 47958 - DNA, 19 bp, Artificial Sequence
  Synthetic: FXN 5 forward 9:69036362-69036385; AsCpf1-2
tgtatatagcgtgtgtgtt

SEQ ID NO: 47959 - DNA, 20 bp, Artificial Sequence
  Synthetic: FXN 5 forward 9:69036362-69036386; AsCpf1-2
tgtatatagcgtgtgtgttg

SEQ ID NO: 47960 - DNA, 21 bp, Artificial Sequence
  Synthetic: FXN 5 forward 9:69036362-69036387; AsCpf1-2
tgtatatagcgtgtgtgttgt

SEQ ID NO: 47961 - DNA, 22 bp, Artificial Sequence
  Synthetic: FXN 5 forward 9:69036362-69036388; AsCpf1-2
tgtatatagcgtgtgtgttgtg

SEQ ID NO: 47962 - DNA, 23 bp, Artificial Sequence
  Synthetic: FXN 5 forward 9:69036362-69036389; AsCpf1-2
tgtatatagcgtgtgtgttgtgt

SEQ ID NO: 47963 - DNA, 24 bp, Artificial Sequence
  Synthetic: FXN 5 forward 9:69036362-69036390; AsCpf1-2
tgtatatagcgtgtgtgttgtgtg

SEQ ID NO: 47964 - DNA, 25 bp, Artificial Sequence
  Synthetic: FXN 5 forward 9:69036362-69036391; AsCpf1-2
tgtatatagcgtgtgtgttgtgtgt

SEQ ID NO: 47965 - DNA, 18 bp, Artificial Sequence
  Synthetic: FXN 5 forward 9:69036368-69036390; AsCpf1-2
tagcgtgtgtgttgtgtg

SEQ ID NO: 47966 - DNA, 19 bp, Artificial Sequence
  Synthetic: FXN 5 forward 9:69036368-69036391; AsCpf1-2
tagcgtgtgtgttgtgtgt

SEQ ID NO: 47967 - DNA, 20 bp, Artificial Sequence
  Synthetic: FXN 5 forward 9:69036368-69036392; AsCpf1-2
tagcgtgtgtgttgtgtgtg

SEQ ID NO: 47968 - DNA, 21 bp, Artificial Sequence
  Synthetic: FXN 5 forward 9:69036368-69036393; AsCpf1-2
tagcgtgtgtgttgtgtgtgt

SEQ ID NO: 47969 - DNA, 22 bp, Artificial Sequence
  Synthetic: FXN 5 forward 9:69036368-69036394; AsCpf1-2
tagcgtgtgtgttgtgtgtgtg

SEQ ID NO: 47970 - DNA, 23 bp, Artificial Sequence
  Synthetic: FXN 5 forward 9:69036368-69036395; AsCpf1-2
tagcgtgtgtgttgtgtgtgtgt

SEQ ID NO: 47971 - DNA, 24 bp, Artificial Sequence
  Synthetic: FXN 5 forward 9:69036368-69036396; AsCpf1-2
tagcgtgtgtgttgtgtgtgtgtg

SEQ ID NO: 47972 - DNA, 25 bp, Artificial Sequence
  Synthetic: FXN 5 forward 9:69036368-69036397; AsCpf1-2
tagcgtgtgtgttgtgtgtgtgtgt

SEQ ID NO: 47973 - DNA, 18 bp, Artificial Sequence
  Synthetic: FXN 5 forward 9:69036370-69036392; AsCpf1-2
gcgtgtgtgttgtgtgtg

SEQ ID NO: 47974 - DNA, 19 bp, Artificial Sequence
  Synthetic: FXN 5 forward 9:69036370-69036393; AsCpf1-2
gcgtgtgtgttgtgtgtgt

SEQ ID NO: 47975 - DNA, 20 bp, Artificial Sequence
  Synthetic: FXN 5 forward 9:69036370-69036394; AsCpf1-2
gcgtgtgtgttgtgtgtgtg

SEQ ID NO: 47976 - DNA, 21 bp, Artificial Sequence
  Synthetic: FXN 5 forward 9:69036370-69036395; AsCpf1-2
gcgtgtgtgttgtgtgtgtgt

SEQ ID NO: 47977 - DNA, 22 bp, Artificial Sequence
  Synthetic: FXN 5 forward 9:69036370-69036396; AsCpf1-2
gcgtgtgtgttgtgtgtgtgtg

SEQ ID NO: 47978 - DNA, 23 bp, Artificial Sequence
  Synthetic: FXN 5 forward 9:69036370-69036397; AsCpf1-2
gcgtgtgtgttgtgtgtgtgtgt

SEQ ID NO: 47979 - DNA, 24 bp, Artificial Sequence
  Synthetic: FXN 5 forward 9:69036370-69036398; AsCpf1-2
gcgtgtgtgttgtgtgtgtgtgtt

SEQ ID NO: 47980 - DNA, 25 bp, Artificial Sequence
  Synthetic: FXN 5 forward 9:69036370-69036399; AsCpf1-2
gcgtgtgtgttgtgtgtgtgtgttt

SEQ ID NO: 47981 - DNA, 18 bp, Artificial Sequence
  Synthetic: FXN 5 reverse 9:69036611-69036633; AsCpf1-2
ttctccctacagaaaaca

SEQ ID NO: 47982 - DNA, 19 bp, Artificial Sequence
  Synthetic: FXN 5 reverse 9:69036611-69036634; AsCpf1-2
ttctccctacagaaaacaa

SEQ ID NO: 47983 - DNA, 20 bp, Artificial Sequence
  Synthetic: FXN 5 reverse 9:69036611-69036635; AsCpf1-2
ttctccctacagaaaacaaa

SEQ ID NO: 47984 - DNA, 21 bp, Artificial Sequence
  Synthetic: FXN 5 reverse 9:69036611-69036636; AsCpf1-2
ttctccctacagaaaacaaag

SEQ ID NO: 47985 - DNA, 22 bp, Artificial Sequence
  Synthetic: FXN 5 reverse 9:69036611-69036637; AsCpf1-2
ttctccctacagaaaacaaagc

SEQ ID NO: 47986 - DNA, 23 bp, Artificial Sequence
  Synthetic: FXN 5 reverse 9:69036611-69036638; AsCpf1-2
ttctccctacagaaaacaaagcc

SEQ ID NO: 47987 - DNA, 24 bp, Artificial Sequence
  Synthetic: FXN 5 reverse 9:69036611-69036639; AsCpf1-2
ttctccctacagaaaacaaagcca

SEQ ID NO: 47988 - DNA, 25 bp, Artificial Sequence
  Synthetic: FXN 5 reverse 9:69036611-69036640; AsCpf1-2
ttctccctacagaaaacaaagccac

SEQ ID NO: 47989 - DNA, 18 bp, Artificial Sequence
  Synthetic: FXN 5 reverse 9:69036664-69036686; AsCpf1-2
ttattcccatttaatcct

SEQ ID NO: 47990 - DNA, 19 bp, Artificial Sequence
  Synthetic: FXN 5 reverse 9:69036664-69036687; AsCpf1-2
ttattcccatttaatcctc

SEQ ID NO: 47991 - DNA, 20 bp, Artificial Sequence
  Synthetic: FXN 5 reverse 9:69036664-69036688; AsCpf1-2
ttattcccatttaatcctca

SEQ ID NO: 47992 - DNA, 21 bp, Artificial Sequence
  Synthetic: FXN 5 reverse 9:69036664-69036689; AsCpf1-2
ttattcccatttaatcctcac

SEQ ID NO: 47993 - DNA, 22 bp, Artificial Sequence
  Synthetic: FXN 5 reverse 9:69036664-69036690; AsCpf1-2
ttattcccatttaatcctcaca

SEQ ID NO: 47994 - DNA, 23 bp, Artificial Sequence
  Synthetic: FXN 5 reverse 9:69036664-69036691; AsCpf1-2
ttattcccatttaatcctcacac

SEQ ID NO: 47995 - DNA, 24 bp, Artificial Sequence
  Synthetic: FXN 5 reverse 9:69036664-69036692; AsCpf1-2
ttattcccatttaatcctcacacc

SEQ ID NO: 47996 - DNA, 25 bp, Artificial Sequence
  Synthetic: FXN 5 reverse 9:69036664-69036693; AsCpf1-2
ttattcccatttaatcctcacacca

SEQ ID NO: 47997 - DNA, 18 bp, Artificial Sequence
  Synthetic: FXN 5 reverse 9:69036668-69036690; AsCpf1-2
tatgttattcccatttaa

SEQ ID NO: 47998 - DNA, 19 bp, Artificial Sequence
  Synthetic: FXN 5 reverse 9:69036668-69036691; AsCpf1-2
tatgttattcccatttaat

SEQ ID NO: 47999 - DNA, 20 bp, Artificial Sequence
  Synthetic: FXN 5 reverse 9:69036668-69036692; AsCpf1-2
tatgttattcccatttaatc

SEQ ID NO: 48000 - DNA, 21 bp, Artificial Sequence
  Synthetic: FXN 5 reverse 9:69036668-69036693; AsCpf1-2
tatgttattcccatttaatcc

SEQ ID NO: 48001 - DNA, 22 bp, Artificial Sequence
  Synthetic: FXN 5 reverse 9:69036668-69036694; AsCpf1-2
tatgttattcccatttaatcct

SEQ ID NO: 48002 - DNA, 23 bp, Artificial Sequence
  Synthetic: FXN 5 reverse 9:69036668-69036695; AsCpf1-2
tatgttattcccatttaatcctc

SEQ ID NO: 48003 - DNA, 24 bp, Artificial Sequence
  Synthetic: FXN 5 reverse 9:69036668-69036696; AsCpf1-2
tatgttattcccatttaatcctca

SEQ ID NO: 48004 - DNA, 25 bp, Artificial Sequence
  Synthetic: FXN 5 reverse 9:69036668-69036697; AsCpf1-2
tatgttattcccatttaatcctcac

SEQ ID NO: 48005 - DNA, 18 bp, Artificial Sequence
  Synthetic: FXN 5 forward 9:69036753-69036775; AsCpf1-2
tgacccagttacgccacg

SEQ ID NO: 48006 - DNA, 19 bp, Artificial Sequence
  Synthetic: FXN 5 forward 9:69036753-69036776; AsCpf1-2
tgacccagttacgccacgg

SEQ ID NO: 48007 - DNA, 20 bp, Artificial Sequence
  Synthetic: FXN 5 forward 9:69036753-69036777; AsCpf1-2
tgacccagttacgccacggc

SEQ ID NO: 48008 - DNA, 21 bp, Artificial Sequence
  Synthetic: FXN 5 forward 9:69036753-69036778; AsCpf1-2
tgacccagttacgccacggct

SEQ ID NO: 48009 - DNA, 22 bp, Artificial Sequence
  Synthetic: FXN 5 forward 9:69036753-69036779; AsCpf1-2
tgacccagttacgccacggctt

SEQ ID NO: 48010 - DNA, 23 bp, Artificial Sequence
  Synthetic: FXN 5 forward 9:69036753-69036780; AsCpf1-2
tgacccagttacgccacggcttg

SEQ ID NO: 48011 - DNA, 24 bp, Artificial Sequence
  Synthetic: FXN 5 forward 9:69036753-69036781; AsCpf1-2
tgacccagttacgccacggcttga

SEQ ID NO: 48012 - DNA, 25 bp, Artificial Sequence
  Synthetic: FXN 5 forward 9:69036753-69036782; AsCpf1-2
tgacccagttacgccacggcttgaa

SEQ ID NO: 48013 - DNA, 18 bp, Artificial Sequence
  Synthetic: FXN 5 reverse 9:69036978-69037000; AsCpf1-2
gcttggacgtggcctgcc

SEQ ID NO: 48014 - DNA, 19 bp, Artificial Sequence
  Synthetic: FXN 5 reverse 9:69036978-69037001; AsCpf1-2
gcttggacgtggcctgcct

SEQ ID NO: 48015 - DNA, 20 bp, Artificial Sequence
  Synthetic: FXN 5 reverse 9:69036978-69037002; AsCpf1-2
gcttggacgtggcctgcctc

SEQ ID NO: 48016 - DNA, 21 bp, Artificial Sequence
  Synthetic: FXN 5 reverse 9:69036978-69037003; AsCpf1-2
gcttggacgtggcctgcctct

SEQ ID NO: 48017 - DNA, 22 bp, Artificial Sequence
  Synthetic: FXN 5 reverse 9:69036978-69037004; AsCpf1-2
gcttggacgtggcctgcctctt

SEQ ID NO: 48018 - DNA, 23 bp, Artificial Sequence
  Synthetic: FXN 5 reverse 9:69036978-69037005; AsCpf1-2
gcttggacgtggcctgcctcttt

SEQ ID NO: 48019 - DNA, 24 bp, Artificial Sequence
  Synthetic: FXN 5 reverse 9:69036978-69037006; AsCpf1-2
gcttggacgtggcctgcctctttc

SEQ ID NO: 48020 - DNA, 25 bp, Artificial Sequence
  Synthetic: FXN 5 reverse 9:69036978-69037007; AsCpf1-2
gcttggacgtggcctgcctctttca

SEQ ID NO: 48021 - DNA, 18 bp, Artificial Sequence
  Synthetic: FXN 5 reverse 9:69037139-69037161; AsCpf1-2
ggcatgagccaccgcgtc

SEQ ID NO: 48022 - DNA, 19 bp, Artificial Sequence
  Synthetic: FXN 5 reverse 9:69037139-69037162; AsCpf1-2
ggcatgagccaccgcgtcc

SEQ ID NO: 48023 - DNA, 20 bp, Artificial Sequence
  Synthetic: FXN 5 reverse 9:69037139-69037163; AsCpf1-2
ggcatgagccaccgcgtcct

SEQ ID NO: 48024 - DNA, 21 bp, Artificial Sequence
  Synthetic: FXN 5 reverse 9:69037139-69037164; AsCpf1-2
ggcatgagccaccgcgtcctg

SEQ ID NO: 48025 - DNA, 22 bp, Artificial Sequence
  Synthetic: FXN 5 reverse 9:69037139-69037165; AsCpf1-2
ggcatgagccaccgcgtcctgc

SEQ ID NO: 48026 - DNA, 23 bp, Artificial Sequence
  Synthetic: FXN 5 reverse 9:69037139-69037166; AsCpf1-2
ggcatgagccaccgcgtcctgcc

SEQ ID NO: 48027 - DNA, 24 bp, Artificial Sequence
  Synthetic: FXN 5 reverse 9:69037139-69037167; AsCpf1-2
ggcatgagccaccgcgtcctgcca

SEQ ID NO: 48028 - DNA, 25 bp, Artificial Sequence
  Synthetic: FXN 5 reverse 9:69037139-69037168; AsCpf1-2
ggcatgagccaccgcgtcctgccag

SEQ ID NO: 48029 - DNA, 18 bp, Artificial Sequence
  Synthetic: FXN 5 forward 9:69037253-69037275; AsCpf1-2
tactaaaaaatacaaaaa

SEQ ID NO: 48030 - DNA, 19 bp, Artificial Sequence
  Synthetic: FXN 5 forward 9:69037253-69037276; AsCpf1-2
tactaaaaaatacaaaaaa

SEQ ID NO: 48031 - DNA, 20 bp, Artificial Sequence
  Synthetic: FXN 5 forward 9:69037253-69037277; AsCpf1-2
tactaaaaaatacaaaaaaa

SEQ ID NO: 48032 - DNA, 21 bp, Artificial Sequence
  Synthetic: FXN 5 forward 9:69037253-69037278; AsCpf1-2
tactaaaaaatacaaaaaaaa

SEQ ID NO: 48033 - DNA, 22 bp, Artificial Sequence
  Synthetic: FXN 5 forward 9:69037253-69037279; AsCpf1-2
tactaaaaaatacaaaaaaaaa

SEQ ID NO: 48034 - DNA, 23 bp, Artificial Sequence
  Synthetic: FXN 5 forward 9:69037253-69037280; AsCpf1-2
tactaaaaaatacaaaaaaaaaa

SEQ ID NO: 48035 - DNA, 24 bp, Artificial Sequence
  Synthetic: FXN 5 forward 9:69037253-69037281; AsCpf1-2
tactaaaaaatacaaaaaaaaaaa

SEQ ID NO: 48036 - DNA, 25 bp, Artificial Sequence
  Synthetic: FXN 5 forward 9:69037253-69037282; AsCpf1-2
tactaaaaaatacaaaaaaaaaaaa

SEQ ID NO: 48037 - DNA, 25 bp, Artificial Sequence
  Synthetic: FXN 5 forward 9:69035935-69035966; SaCas9
ccccgccgcgcagtaagtatccgcg

SEQ ID NO: 48038 - DNA, 24 bp, Artificial Sequence
  Synthetic: FXN 5 forward 9:69035936-69035966; SaCas9
cccgccgcgcagtaagtatccgcg

SEQ ID NO: 48039 - DNA, 23 bp, Artificial Sequence
  Synthetic: FXN 5 forward 9:69035937-69035966; SaCas9
ccgccgcgcagtaagtatccgcg

SEQ ID NO: 48040 - DNA, 22 bp, Artificial Sequence
  Synthetic: FXN 5 forward 9:69035938-69035966; SaCas9
cgccgcgcagtaagtatccgcg

SEQ ID NO: 48041 - DNA, 21 bp, Artificial Sequence
  Synthetic: FXN 5 forward 9:69035939-69035966; SaCas9
gccgcgcagtaagtatccgcg

SEQ ID NO: 48042 - DNA, 20 bp, Artificial Sequence
  Synthetic: FXN 5 forward 9:69035940-69035966; SaCas9
ccgcgcagtaagtatccgcg

SEQ ID NO: 48043 - DNA, 19 bp, Artificial Sequence
  Synthetic: FXN 5 forward 9:69035941-69035966; SaCas9
cgcgcagtaagtatccgcg

SEQ ID NO: 48044 - DNA, 18 bp, Artificial Sequence
  Synthetic: FXN 5 forward 9:69035942-69035966; SaCas9
gcgcagtaagtatccgcg

SEQ ID NO: 48045 - DNA, 25 bp, Artificial Sequence
  Synthetic: FXN 5 forward 9:69035936-69035967; SaCas9
cccgccgcgcagtaagtatccgcgc

SEQ ID NO: 48046 - DNA, 24 bp, Artificial Sequence
  Synthetic: FXN 5 forward 9:69035937-69035967; SaCas9
ccgccgcgcagtaagtatccgcgc

SEQ ID NO: 48047 - DNA, 23 bp, Artificial Sequence
  Synthetic: FXN 5 forward 9:69035938-69035967; SaCas9
cgccgcgcagtaagtatccgcgc

SEQ ID NO: 48048 - DNA, 22 bp, Artificial Sequence
  Synthetic: FXN 5 forward 9:69035939-69035967; SaCas9
gccgcgcagtaagtatccgcgc

SEQ ID NO: 48049 - DNA, 21 bp, Artificial Sequence
  Synthetic: FXN 5 forward 9:69035940-69035967; SaCas9
ccgcgcagtaagtatccgcgc

SEQ ID NO: 48050 - DNA, 20 bp, Artificial Sequence
  Synthetic: FXN 5 forward 9:69035941-69035967; SaCas9
cgcgcagtaagtatccgcgc

SEQ ID NO: 48051 - DNA, 19 bp, Artificial Sequence
  Synthetic: FXN 5 forward 9:69035942-69035967; SaCas9
gcgcagtaagtatccgcgc

SEQ ID NO: 48052 - DNA, 18 bp, Artificial Sequence
  Synthetic: FXN 5 forward 9:69035943-69035967; SaCas9
cgcagtaagtatccgcgc

SEQ ID NO: 48053 - DNA, 25 bp, Artificial Sequence
  Synthetic: FXN 5 forward 9:69035937-69035968; SaCas9
ccgccgcgcagtaagtatccgcgcc

SEQ ID NO: 48054 - DNA, 24 bp, Artificial Sequence
  Synthetic: FXN 5 forward 9:69035938-69035968; SaCas9
cgccgcgcagtaagtatccgcgcc

SEQ ID NO: 48055 - DNA, 23 bp, Artificial Sequence
  Synthetic: FXN 5 forward 9:69035939-69035968; SaCas9
gccgcgcagtaagtatccgcgcc

SEQ ID NO: 48056 - DNA, 22 bp, Artificial Sequence
  Synthetic: FXN 5 forward 9:69035940-69035968; SaCas9
ccgcgcagtaagtatccgcgcc

SEQ ID NO: 48057 - DNA, 21 bp, Artificial Sequence
  Synthetic: FXN 5 forward 9:69035941-69035968; SaCas9
cgcgcagtaagtatccgcgcc

SEQ ID NO: 48058 - DNA, 20 bp, Artificial Sequence
  Synthetic: FXN 5 forward 9:69035942-69035968; SaCas9
gcgcagtaagtatccgcgcc

SEQ ID NO: 48059 - DNA, 19 bp, Artificial Sequence
  Synthetic: FXN 5 forward 9:69035943-69035968; SaCas9
cgcagtaagtatccgcgcc

SEQ ID NO: 48060 - DNA, 18 bp, Artificial Sequence
  Synthetic: FXN 5 forward 9:69035944-69035968; SaCas9
gcagtaagtatccgcgcc

SEQ ID NO: 48061 - DNA, 25 bp, Artificial Sequence
  Synthetic: FXN 5 forward 9:69035947-69035978; SaCas9
gtaagtatccgcgccgggaacagcc

SEQ ID NO: 48062 - DNA, 24 bp, Artificial Sequence
  Synthetic: FXN 5 forward 9:69035948-69035978; SaCas9
taagtatccgcgccgggaacagcc

SEQ ID NO: 48063 - DNA, 23 bp, Artificial Sequence
  Synthetic: FXN 5 forward 9:69035949-69035978; SaCas9
aagtatccgcgccgggaacagcc

SEQ ID NO: 48064 - DNA, 22 bp, Artificial Sequence
  Synthetic: FXN 5 forward 9:69035950-69035978; SaCas9
agtatccgcgccgggaacagcc

SEQ ID NO: 48065 - DNA, 21 bp, Artificial Sequence
  Synthetic: FXN 5 forward 9:69035951-69035978; SaCas9
gtatccgcgccgggaacagcc

SEQ ID NO: 48066 - DNA, 20 bp, Artificial Sequence
  Synthetic: FXN 5 forward 9:69035952-69035978; SaCas9
tatccgcgccgggaacagcc

SEQ ID NO: 48067 - DNA, 19 bp, Artificial Sequence
  Synthetic: FXN 5 forward 9:69035953-69035978; SaCas9
atccgcgccgggaacagcc

SEQ ID NO: 48068 - DNA, 18 bp, Artificial Sequence
  Synthetic: FXN 5 forward 9:69035954-69035978; SaCas9
tccgcgccgggaacagcc

SEQ ID NO: 48069 - DNA, 25 bp, Artificial Sequence
  Synthetic: FXN 5 reverse 9:69035953-69035984; SaCas9
cgtgcggcccgcggctgttcccggc

SEQ ID NO: 48070 - DNA, 24 bp, Artificial Sequence
  Synthetic: FXN 5 reverse 9:69035954-69035984; SaCas9
gtgcggcccgcggctgttcccggc

SEQ ID NO: 48071 - DNA, 23 bp, Artificial Sequence
  Synthetic: FXN 5 reverse 9:69035955-69035984; SaCas9
tgcggcccgcggctgttcccggc

SEQ ID NO: 48072 - DNA, 22 bp, Artificial Sequence
  Synthetic: FXN 5 reverse 9:69035956-69035984; SaCas9
gcggcccgcggctgttcccggc

SEQ ID NO: 48073 - DNA, 21 bp, Artificial Sequence
  Synthetic: FXN 5 reverse 9:69035957-69035984; SaCas9
cggcccgcggctgttcccggc

SEQ ID NO: 48074 - DNA, 20 bp, Artificial Sequence
  Synthetic: FXN 5 reverse 9:69035958-69035984; SaCas9
ggcccgcggctgttcccggc

SEQ ID NO: 48075 - DNA, 19 bp, Artificial Sequence
  Synthetic: FXN 5 reverse 9:69035959-69035984; SaCas9
gcccgcggctgttcccggc

SEQ ID NO: 48076 - DNA, 18 bp, Artificial Sequence
  Synthetic: FXN 5 reverse 9:69035960-69035984; SaCas9
cccgcggctgttcccggc

SEQ ID NO: 48077 - DNA, 25 bp, Artificial Sequence
  Synthetic: FXN 5 forward 9:69035961-69035992; SaCas9
cgggaacagccgcgggccgcacgcc

SEQ ID NO: 48078 - DNA, 24 bp, Artificial Sequence
  Synthetic: FXN 5 forward 9:69035962-69035992; SaCas9
gggaacagccgcgggccgcacgcc

SEQ ID NO: 48079 - DNA, 23 bp, Artificial Sequence
  Synthetic: FXN 5 forward 9:69035963-69035992; SaCas9
ggaacagccgcgggccgcacgcc

SEQ ID NO: 48080 - DNA, 22 bp, Artificial Sequence
  Synthetic: FXN 5 forward 9:69035964-69035992; SaCas9
gaacagccgcgggccgcacgcc

SEQ ID NO: 48081 - DNA, 21 bp, Artificial Sequence
  Synthetic: FXN 5 forward 9:69035965-69035992; SaCas9
aacagccgcgggccgcacgcc

SEQ ID NO: 48082 - DNA, 20 bp, Artificial Sequence
  Synthetic: FXN 5 forward 9:69035966-69035992; SaCas9
acagccgcgggccgcacgcc

SEQ ID NO: 48083 - DNA, 19 bp, Artificial Sequence
  Synthetic: FXN 5 forward 9:69035967-69035992; SaCas9
cagccgcgggccgcacgcc

SEQ ID NO: 48084 - DNA, 18 bp, Artificial Sequence
  Synthetic: FXN 5 forward 9:69035968-69035992; SaCas9
agccgcgggccgcacgcc

SEQ ID NO: 48085 - DNA, 25 bp, Artificial Sequence
  Synthetic: FXN 5 forward 9:69035986-69036017; SaCas9
gcgggccgcacgccgcacgcctgcg

SEQ ID NO: 48086 - DNA, 24 bp, Artificial Sequence
  Synthetic: FXN 5 forward 9:69035987-69036017; SaCas9
cgggccgcacgccgcacgcctgcg

SEQ ID NO: 48087 - DNA, 23 bp, Artificial Sequence
  Synthetic: FXN 5 forward 9:69035988-69036017; SaCas9
gggccgcacgccgcacgcctgcg

SEQ ID NO: 48088 - DNA, 22 bp, Artificial Sequence
  Synthetic: FXN 5 forward 9:69035989-69036017; SaCas9
ggccgcacgccgcacgcctgcg

SEQ ID NO: 48089 - DNA, 21 bp, Artificial Sequence
  Synthetic: FXN 5 forward 9:69035990-69036017; SaCas9
gccgcacgccgcacgcctgcg

SEQ ID NO: 48090 - DNA, 20 bp, Artificial Sequence
  Synthetic: FXN 5 forward 9:69035991-69036017; SaCas9
ccgcacgccgcacgcctgcg

SEQ ID NO: 48091 - DNA, 19 bp, Artificial Sequence
  Synthetic: FXN 5 forward 9:69035992-69036017; SaCas9
cgcacgccgcacgcctgcg

SEQ ID NO: 48092 - DNA, 18 bp, Artificial Sequence
  Synthetic: FXN 5 forward 9:69035993-69036017; SaCas9
gcacgccgcacgcctgcg

SEQ ID NO: 48093 - DNA, 25 bp, Artificial Sequence
  Synthetic: FXN 5 forward 9:69035987-69036018; SaCas9
cgggccgcacgccgcacgcctgcgc

SEQ ID NO: 48094 - DNA, 24 bp, Artificial Sequence
  Synthetic: FXN 5 forward 9:69035988-69036018; SaCas9
gggccgcacgccgcacgcctgcgc

SEQ ID NO: 48095 - DNA, 23 bp, Artificial Sequence
  Synthetic: FXN 5 forward 9:69035989-69036018; SaCas9
ggccgcacgccgcacgcctgcgc

SEQ ID NO: 48096 - DNA, 22 bp, Artificial Sequence
  Synthetic: FXN 5 forward 9:69035990-69036018; SaCas9
gccgcacgccgcacgcctgcgc

SEQ ID NO: 48097 - DNA, 21 bp, Artificial Sequence
  Synthetic: FXN 5 forward 9:69035991-69036018; SaCas9
ccgcacgccgcacgcctgcgc

SEQ ID NO: 48098 - DNA, 20 bp, Artificial Sequence
  Synthetic: FXN 5 forward 9:69035992-69036018; SaCas9
cgcacgccgcacgcctgcgc

SEQ ID NO: 48099 - DNA, 19 bp, Artificial Sequence
  Synthetic: FXN 5 forward 9:69035993-69036018; SaCas9
gcacgccgcacgcctgcgc

SEQ ID NO: 48100 - DNA, 18 bp, Artificial Sequence
  Synthetic: FXN 5 forward 9:69035994-69036018; SaCas9
cacgccgcacgcctgcgc

SEQ ID NO: 48101 - DNA, 25 bp, Artificial Sequence
  Synthetic: FXN 5 forward 9:69035988-69036019; SaCas9
gggccgcacgccgcacgcctgcgca

SEQ ID NO: 48102 - DNA, 24 bp, Artificial Sequence
  Synthetic: FXN 5 forward 9:69035989-69036019; SaCas9
ggccgcacgccgcacgcctgcgca

SEQ ID NO: 48103 - DNA, 23 bp, Artificial Sequence
  Synthetic: FXN 5 forward 9:69035990-69036019; SaCas9
gccgcacgccgcacgcctgcgca

SEQ ID NO: 48104 - DNA, 22 bp, Artificial Sequence
  Synthetic: FXN 5 forward 9:69035991-69036019; SaCas9
ccgcacgccgcacgcctgcgca

SEQ ID NO: 48105 - DNA, 21 bp, Artificial Sequence
  Synthetic: FXN 5 forward 9:69035992-69036019; SaCas9
cgcacgccgcacgcctgcgca

SEQ ID NO: 48106 - DNA, 20 bp, Artificial Sequence
  Synthetic: FXN 5 forward 9:69035993-69036019; SaCas9
gcacgccgcacgcctgcgca

SEQ ID NO: 48107 - DNA, 19 bp, Artificial Sequence
  Synthetic: FXN 5 forward 9:69035994-69036019; SaCas9
cacgccgcacgcctgcgca

SEQ ID NO: 48108 - DNA, 18 bp, Artificial Sequence
  Synthetic: FXN 5 forward 9:69035995-69036019; SaCas9
acgccgcacgcctgcgca

SEQ ID NO: 48109 - DNA, 25 bp, Artificial Sequence
  Synthetic: FXN 5 forward 9:69036005-69036036; SaCas9
cctgcgcagggaggcgccgcgcacg

SEQ ID NO: 48110 - DNA, 24 bp, Artificial Sequence
  Synthetic: FXN 5 forward 9:69036006-69036036; SaCas9
ctgcgcagggaggcgccgcgcacg

SEQ ID NO: 48111 - DNA, 23 bp, Artificial Sequence
  Synthetic: FXN 5 forward 9:69036007-69036036; SaCas9
tgcgcagggaggcgccgcgcacg

SEQ ID NO: 48112 - DNA, 22 bp, Artificial Sequence
  Synthetic: FXN 5 forward 9:69036008-69036036; SaCas9
gcgcagggaggcgccgcgcacg

SEQ ID NO: 48113 - DNA, 21 bp, Artificial Sequence
  Synthetic: FXN 5 forward 9:69036009-69036036; SaCas9
cgcagggaggcgccgcgcacg

SEQ ID NO: 48114 - DNA, 20 bp, Artificial Sequence
  Synthetic: FXN 5 forward 9:69036010-69036036; SaCas9
gcagggaggcgccgcgcacg

SEQ ID NO: 48115 - DNA, 19 bp, Artificial Sequence
  Synthetic: FXN 5 forward 9:69036011-69036036; SaCas9
cagggaggcgccgcgcacg

SEQ ID NO: 48116 - DNA, 18 bp, Artificial Sequence
  Synthetic: FXN 5 forward 9:69036012-69036036; SaCas9
agggaggcgccgcgcacg

SEQ ID NO: 48117 - DNA, 25 bp, Artificial Sequence
  Synthetic: FXN 5 forward 9:69036006-69036037; SaCas9
ctgcgcagggaggcgccgcgcacgc

SEQ ID NO: 48118 - DNA, 24 bp, Artificial Sequence
  Synthetic: FXN 5 forward 9:69036007-69036037; SaCas9
tgcgcagggaggcgccgcgcacgc

SEQ ID NO: 48119 - DNA, 23 bp, Artificial Sequence
  Synthetic: FXN 5 forward 9:69036008-69036037; SaCas9
gcgcagggaggcgccgcgcacgc

SEQ ID NO: 48120 - DNA, 22 bp, Artificial Sequence
  Synthetic: FXN 5 forward 9:69036009-69036037; SaCas9
cgcagggaggcgccgcgcacgc

SEQ ID NO: 48121 - DNA, 21 bp, Artificial Sequence
  Synthetic: FXN 5 forward 9:69036010-69036037; SaCas9
gcagggaggcgccgcgcacgc

SEQ ID NO: 48122 - DNA, 20 bp, Artificial Sequence
  Synthetic: FXN 5 forward 9:69036011-69036037; SaCas9
cagggaggcgccgcgcacgc

SEQ ID NO: 48123 - DNA, 19 bp, Artificial Sequence
  Synthetic: FXN 5 forward 9:69036012-69036037; SaCas9
agggaggcgccgcgcacgc

SEQ ID NO: 48124 - DNA, 18 bp, Artificial Sequence
  Synthetic: FXN 5 forward 9:69036013-69036037; SaCas9
gggaggcgccgcgcacgc

SEQ ID NO: 48125 - DNA, 25 bp, Artificial Sequence
  Synthetic: FXN 5 forward 9:69036016-69036047; SaCas9
aggcgccgcgcacgccggggtcgct

SEQ ID NO: 48126 - DNA, 24 bp, Artificial Sequence
  Synthetic: FXN 5 forward 9:69036017-69036047; SaCas9
ggcgccgcgcacgccggggtcgct

SEQ ID NO: 48127 - DNA, 23 bp, Artificial Sequence
  Synthetic: FXN 5 forward 9:69036018-69036047; SaCas9
gcgccgcgcacgccggggtcgct

SEQ ID NO: 48128 - DNA, 22 bp, Artificial Sequence
  Synthetic: FXN 5 forward 9:69036019-69036047; SaCas9
cgccgcgcacgccggggtcgct

SEQ ID NO: 48129 - DNA, 21 bp, Artificial Sequence
  Synthetic: FXN 5 forward 9:69036020-69036047; SaCas9
gccgcgcacgccggggtcgct

SEQ ID NO: 48130 - DNA, 20 bp, Artificial Sequence
  Synthetic: FXN 5 forward 9:69036021-69036047; SaCas9
ccgcgcacgccggggtcgct

SEQ ID NO: 48131 - DNA, 19 bp, Artificial Sequence
  Synthetic: FXN 5 forward 9:69036022-69036047; SaCas9
cgcgcacgccggggtcgct

SEQ ID NO: 48132 - DNA, 18 bp, Artificial Sequence
  Synthetic: FXN 5 forward 9:69036023-69036047; SaCas9
gcgcacgccggggtcgct

SEQ ID NO: 48133 - DNA, 25 bp, Artificial Sequence
  Synthetic: FXN 5 forward 9:69036029-69036060; SaCas9
gccggggtcgctccgggtacgcgcg

SEQ ID NO: 48134 - DNA, 24 bp, Artificial Sequence
  Synthetic: FXN 5 forward 9:69036030-69036060; SaCas9
ccggggtcgctccgggtacgcgcg

SEQ ID NO: 48135 - DNA, 23 bp, Artificial Sequence
  Synthetic: FXN 5 forward 9:69036031-69036060; SaCas9
cggggtcgctccgggtacgcgcg

SEQ ID NO: 48136 - DNA, 22 bp, Artificial Sequence
  Synthetic: FXN 5 forward 9:69036032-69036060; SaCas9
ggggtcgctccgggtacgcgcg

SEQ ID NO: 48137 - DNA, 21 bp, Artificial Sequence
  Synthetic: FXN 5 forward 9:69036033-69036060; SaCas9
gggtcgctccgggtacgcgcg

SEQ ID NO: 48138 - DNA, 20 bp, Artificial Sequence
  Synthetic: FXN 5 forward 9:69036034-69036060; SaCas9
ggtcgctccgggtacgcgcg

SEQ ID NO: 48139 - DNA, 19 bp, Artificial Sequence
  Synthetic: FXN 5 forward 9:69036035-69036060; SaCas9
gtcgctccgggtacgcgcg

SEQ ID NO: 48140 - DNA, 18 bp, Artificial Sequence
  Synthetic: FXN 5 forward 9:69036036-69036060; SaCas9
tcgctccgggtacgcgcg

SEQ ID NO: 48141 - DNA, 25 bp, Artificial Sequence
  Synthetic: FXN 5 reverse 9:69036038-69036069; SaCas9
ggtgagctagtccagcgcgcgtacc

SEQ ID NO: 48142 - DNA, 24 bp, Artificial Sequence
  Synthetic: FXN 5 reverse 9:69036039-69036069; SaCas9
gtgagctagtccagcgcgcgtacc

SEQ ID NO: 48143 - DNA, 23 bp, Artificial Sequence
  Synthetic: FXN 5 reverse 9:69036040-69036069; SaCas9
tgagctagtccagcgcgcgtacc

SEQ ID NO: 48144 - DNA, 22 bp, Artificial Sequence
  Synthetic: FXN 5 reverse 9:69036041-69036069; SaCas9
gagctagtccagcgcgcgtacc

SEQ ID NO: 48145 - DNA, 21 bp, Artificial Sequence
  Synthetic: FXN 5 reverse 9:69036042-69036069; SaCas9
agctagtccagcgcgcgtacc

SEQ ID NO: 48146 - DNA, 20 bp, Artificial Sequence
  Synthetic: FXN 5 reverse 9:69036043-69036069; SaCas9
gctagtccagcgcgcgtacc

SEQ ID NO: 48147 - DNA, 19 bp, Artificial Sequence
  Synthetic: FXN 5 reverse 9:69036044-69036069; SaCas9
ctagtccagcgcgcgtacc

SEQ ID NO: 48148 - DNA, 18 bp, Artificial Sequence
  Synthetic: FXN 5 reverse 9:69036045-69036069; SaCas9
tagtccagcgcgcgtacc

SEQ ID NO: 48149 - DNA, 25 bp, Artificial Sequence
  Synthetic: FXN 5 reverse 9:69036039-69036070; SaCas9
gggtgagctagtccagcgcgcgtac

SEQ ID NO: 48150 - DNA, 24 bp, Artificial Sequence
  Synthetic: FXN 5 reverse 9:69036040-69036070; SaCas9
ggtgagctagtccagcgcgcgtac

SEQ ID NO: 48151 - DNA, 23 bp, Artificial Sequence
  Synthetic: FXN 5 reverse 9:69036041-69036070; SaCas9
gtgagctagtccagcgcgcgtac

SEQ ID NO: 48152 - DNA, 22 bp, Artificial Sequence
  Synthetic: FXN 5 reverse 9:69036042-69036070; SaCas9
tgagctagtccagcgcgcgtac

SEQ ID NO: 48153 - DNA, 21 bp, Artificial Sequence
  Synthetic: FXN 5 reverse 9:69036043-69036070; SaCas9
gagctagtccagcgcgcgtac

SEQ ID NO: 48154 - DNA, 20 bp, Artificial Sequence
  Synthetic: FXN 5 reverse 9:69036044-69036070; SaCas9
agctagtccagcgcgcgtac

SEQ ID NO: 48155 - DNA, 19 bp, Artificial Sequence
  Synthetic: FXN 5 reverse 9:69036045-69036070; SaCas9
gctagtccagcgcgcgtac

SEQ ID NO: 48156 - DNA, 18 bp, Artificial Sequence
  Synthetic: FXN 5 reverse 9:69036046-69036070; SaCas9
ctagtccagcgcgcgtac

SEQ ID NO: 48157 - DNA, 25 bp, Artificial Sequence
  Synthetic: FXN 5 forward 9:69036055-69036086; SaCas9
tggactagctcaccccgctccttct

SEQ ID NO: 48158 - DNA, 24 bp, Artificial Sequence
  Synthetic: FXN 5 forward 9:69036056-69036086; SaCas9
ggactagctcaccccgctccttct

SEQ ID NO: 48159 - DNA, 23 bp, Artificial Sequence
  Synthetic: FXN 5 forward 9:69036057-69036086; SaCas9
gactagctcaccccgctccttct

SEQ ID NO: 48160 - DNA, 22 bp, Artificial Sequence
  Synthetic: FXN 5 forward 9:69036058-69036086; SaCas9
actagctcaccccgctccttct

SEQ ID NO: 48161 - DNA, 21 bp, Artificial Sequence
  Synthetic: FXN 5 forward 9:69036059-69036086; SaCas9
ctagctcaccccgctccttct

SEQ ID NO: 48162 - DNA, 20 bp, Artificial Sequence
  Synthetic: FXN 5 forward 9:69036060-69036086; SaCas9
tagctcaccccgctccttct

SEQ ID NO: 48163 - DNA, 19 bp, Artificial Sequence
  Synthetic: FXN 5 forward 9:69036061-69036086; SaCas9
agctcaccccgctccttct

SEQ ID NO: 48164 - DNA, 18 bp, Artificial Sequence
  Synthetic: FXN 5 forward 9:69036062-69036086; SaCas9
gctcaccccgctccttct

SEQ ID NO: 48165 - DNA, 25 bp, Artificial Sequence
  Synthetic: FXN 5 reverse 9:69036062-69036093; SaCas9
ccgggccgccctgagaaggagcggg

SEQ ID NO: 48166 - DNA, 24 bp, Artificial Sequence
  Synthetic: FXN 5 reverse 9:69036063-69036093; SaCas9
cgggccgccctgagaaggagcggg

SEQ ID NO: 48167 - DNA, 23 bp, Artificial Sequence
  Synthetic: FXN 5 reverse 9:69036064-69036093; SaCas9
gggccgccctgagaaggagcggg

SEQ ID NO: 48168 - DNA, 22 bp, Artificial Sequence
  Synthetic: FXN 5 reverse 9:69036065-69036093; SaCas9
ggccgccctgagaaggagcggg

SEQ ID NO: 48169 - DNA, 21 bp, Artificial Sequence
  Synthetic: FXN 5 reverse 9:69036066-69036093; SaCas9
gccgccctgagaaggagcggg

SEQ ID NO: 48170 - DNA, 20 bp, Artificial Sequence
  Synthetic: FXN 5 reverse 9:69036067-69036093; SaCas9
ccgccctgagaaggagcggg

SEQ ID NO: 48171 - DNA, 19 bp, Artificial Sequence
  Synthetic: FXN 5 reverse 9:69036068-69036093; SaCas9
cgccctgagaaggagcggg

SEQ ID NO: 48172 - DNA, 18 bp, Artificial Sequence
  Synthetic: FXN 5 reverse 9:69036069-69036093; SaCas9
gccctgagaaggagcggg

SEQ ID NO: 48173 - DNA, 25 bp, Artificial Sequence
  Synthetic: FXN 5 reverse 9:69036066-69036097; SaCas9
tccgccgggccgccctgagaaggag

SEQ ID NO: 48174 - DNA, 24 bp, Artificial Sequence
  Synthetic: FXN 5 reverse 9:69036067-69036097; SaCas9
ccgccgggccgccctgagaaggag

SEQ ID NO: 48175 - DNA, 23 bp, Artificial Sequence
  Synthetic: FXN 5 reverse 9:69036068-69036097; SaCas9
cgccgggccgccctgagaaggag

SEQ ID NO: 48176 - DNA, 22 bp, Artificial Sequence
  Synthetic: FXN 5 reverse 9:69036069-69036097; SaCas9
gccgggccgccctgagaaggag

SEQ ID NO: 48177 - DNA, 21 bp, Artificial Sequence
  Synthetic: FXN 5 reverse 9:69036070-69036097; SaCas9
ccgggccgccctgagaaggag

SEQ ID NO: 48178 - DNA, 20 bp, Artificial Sequence
  Synthetic: FXN 5 reverse 9:69036071-69036097; SaCas9
cgggccgccctgagaaggag

SEQ ID NO: 48179 - DNA, 19 bp, Artificial Sequence
  Synthetic: FXN 5 reverse 9:69036072-69036097; SaCas9
gggccgccctgagaaggag

SEQ ID NO: 48180 - DNA, 18 bp, Artificial Sequence
  Synthetic: FXN 5 reverse 9:69036073-69036097; SaCas9
ggccgccctgagaaggag

SEQ ID NO: 48181 - DNA, 25 bp, Artificial Sequence
  Synthetic: FXN 5 forward 9:69036067-69036098; SaCas9
ccccgctccttctcagggcggcccg

SEQ ID NO: 48182 - DNA, 24 bp, Artificial Sequence
  Synthetic: FXN 5 forward 9:69036068-69036098; SaCas9
cccgctccttctcagggcggcccg

SEQ ID NO: 48183 - DNA, 23 bp, Artificial Sequence
  Synthetic: FXN 5 forward 9:69036069-69036098; SaCas9
ccgctccttctcagggcggcccg

SEQ ID NO: 48184 - DNA, 22 bp, Artificial Sequence
  Synthetic: FXN 5 forward 9:69036070-69036098; SaCas9
cgctccttctcagggcggcccg

SEQ ID NO: 48185 - DNA, 21 bp, Artificial Sequence
  Synthetic: FXN 5 forward 9:69036071-69036098; SaCas9
gctccttctcagggcggcccg

SEQ ID NO: 48186 - DNA, 20 bp, Artificial Sequence
  Synthetic: FXN 5 forward 9:69036072-69036098; SaCas9
ctccttctcagggcggcccg

SEQ ID NO: 48187 - DNA, 19 bp, Artificial Sequence
  Synthetic: FXN 5 forward 9:69036073-69036098; SaCas9
tccttctcagggcggcccg

SEQ ID NO: 48188 - DNA, 18 bp, Artificial Sequence
  Synthetic: FXN 5 forward 9:69036074-69036098; SaCas9
ccttctcagggcggcccg

SEQ ID NO: 48189 - DNA, 25 bp, Artificial Sequence
  Synthetic: FXN 5 reverse 9:69036067-69036098; SaCas9
ttccgccgggccgccctgagaagga

SEQ ID NO: 48190 - DNA, 24 bp, Artificial Sequence
  Synthetic: FXN 5 reverse 9:69036068-69036098; SaCas9
tccgccgggccgccctgagaagga

SEQ ID NO: 48191 - DNA, 23 bp, Artificial Sequence
  Synthetic: FXN 5 reverse 9:69036069-69036098; SaCas9
ccgccgggccgccctgagaagga

SEQ ID NO: 48192 - DNA, 22 bp, Artificial Sequence
  Synthetic: FXN 5 reverse 9:69036070-69036098; SaCas9
cgccgggccgccctgagaagga

SEQ ID NO: 48193 - DNA, 21 bp, Artificial Sequence
  Synthetic: FXN 5 reverse 9:69036071-69036098; SaCas9
gccgggccgccctgagaagga

SEQ ID NO: 48194 - DNA, 20 bp, Artificial Sequence
  Synthetic: FXN 5 reverse 9:69036072-69036098; SaCas9
ccgggccgccctgagaagga

SEQ ID NO: 48195 - DNA, 19 bp, Artificial Sequence
  Synthetic: FXN 5 reverse 9:69036073-69036098; SaCas9
cgggccgccctgagaagga

SEQ ID NO: 48196 - DNA, 18 bp, Artificial Sequence
  Synthetic: FXN 5 reverse 9:69036074-69036098; SaCas9
gggccgccctgagaagga

SEQ ID NO: 48197 - DNA, 25 bp, Artificial Sequence
  Synthetic: FXN 5 forward 9:69036068-69036099; SaCas9
cccgctccttctcagggcggcccgg

SEQ ID NO: 48198 - DNA, 24 bp, Artificial Sequence
  Synthetic: FXN 5 forward 9:69036069-69036099; SaCas9
ccgctccttctcagggcggcccgg

SEQ ID NO: 48199 - DNA, 23 bp, Artificial Sequence
  Synthetic: FXN 5 forward 9:69036070-69036099; SaCas9
cgctccttctcagggcggcccgg

SEQ ID NO: 48200 - DNA, 22 bp, Artificial Sequence
  Synthetic: FXN 5 forward 9:69036071-69036099; SaCas9
gctccttctcagggcggcccgg

SEQ ID NO: 48201 - DNA, 21 bp, Artificial Sequence
  Synthetic: FXN 5 forward 9:69036072-69036099; SaCas9
ctccttctcagggcggcccgg

SEQ ID NO: 48202 - DNA, 20 bp, Artificial Sequence
  Synthetic: FXN 5 forward 9:69036073-69036099; SaCas9
tccttctcagggcggcccgg

SEQ ID NO: 48203 - DNA, 19 bp, Artificial Sequence
  Synthetic: FXN 5 forward 9:69036074-69036099; SaCas9
ccttctcagggcggcccgg

SEQ ID NO: 48204 - DNA, 18 bp, Artificial Sequence
  Synthetic: FXN 5 forward 9:69036075-69036099; SaCas9
cttctcagggcggcccgg

SEQ ID NO: 48205 - DNA, 25 bp, Artificial Sequence
  Synthetic: FXN 5 reverse 9:69036071-69036102; SaCas9
ccgcttccgccgggccgccctgaga

SEQ ID NO: 48206 - DNA, 24 bp, Artificial Sequence
  Synthetic: FXN 5 reverse 9:69036072-69036102; SaCas9
cgcttccgccgggccgccctgaga

SEQ ID NO: 48207 - DNA, 23 bp, Artificial Sequence
  Synthetic: FXN 5 reverse 9:69036073-69036102; SaCas9
gcttccgccgggccgccctgaga

SEQ ID NO: 48208 - DNA, 22 bp, Artificial Sequence
  Synthetic: FXN 5 reverse 9:69036074-69036102; SaCas9
cttccgccgggccgccctgaga

SEQ ID NO: 48209 - DNA, 21 bp, Artificial Sequence
  Synthetic: FXN 5 reverse 9:69036075-69036102; SaCas9
ttccgccgggccgccctgaga

SEQ ID NO: 48210 - DNA, 20 bp, Artificial Sequence
  Synthetic: FXN 5 reverse 9:69036076-69036102; SaCas9
tccgccgggccgccctgaga

SEQ ID NO: 48211 - DNA, 19 bp, Artificial Sequence
  Synthetic: FXN 5 reverse 9:69036077-69036102; SaCas9
ccgccgggccgccctgaga

SEQ ID NO: 48212 - DNA, 18 bp, Artificial Sequence
  Synthetic: FXN 5 reverse 9:69036078-69036102; SaCas9
cgccgggccgccctgaga

SEQ ID NO: 48213 - DNA, 25 bp, Artificial Sequence
  Synthetic: FXN 5 reverse 9:69036072-69036103; SaCas9
gccgcttccgccgggccgccctgag

SEQ ID NO: 48214 - DNA, 24 bp, Artificial Sequence
  Synthetic: FXN 5 reverse 9:69036073-69036103; SaCas9
ccgcttccgccgggccgccctgag

SEQ ID NO: 48215 - DNA, 23 bp, Artificial Sequence
  Synthetic: FXN 5 reverse 9:69036074-69036103; SaCas9
cgcttccgccgggccgccctgag

SEQ ID NO: 48216 - DNA, 22 bp, Artificial Sequence
  Synthetic: FXN 5 reverse 9:69036075-69036103; SaCas9
gcttccgccgggccgccctgag

SEQ ID NO: 48217 - DNA, 21 bp, Artificial Sequence
  Synthetic: FXN 5 reverse 9:69036076-69036103; SaCas9
cttccgccgggccgccctgag

SEQ ID NO: 48218 - DNA, 20 bp, Artificial Sequence
  Synthetic: FXN 5 reverse 9:69036077-69036103; SaCas9
ttccgccgggccgccctgag

SEQ ID NO: 48219 - DNA, 19 bp, Artificial Sequence
  Synthetic: FXN 5 reverse 9:69036078-69036103; SaCas9
tccgccgggccgccctgag

SEQ ID NO: 48220 - DNA, 18 bp, Artificial Sequence
  Synthetic: FXN 5 reverse 9:69036079-69036103; SaCas9
ccgccgggccgccctgag

SEQ ID NO: 48221 - DNA, 25 bp, Artificial Sequence
  Synthetic: FXN 5 reverse 9:69036075-69036106; SaCas9
aaggccgcttccgccgggccgccct

SEQ ID NO: 48222 - DNA, 24 bp, Artificial Sequence
  Synthetic: FXN 5 reverse 9:69036076-69036106; SaCas9
aggccgcttccgccgggccgccct

SEQ ID NO: 48223 - DNA, 23 bp, Artificial Sequence
  Synthetic: FXN 5 reverse 9:69036077-69036106; SaCas9
ggccgcttccgccgggccgccct

SEQ ID NO: 48224 - DNA, 22 bp, Artificial Sequence
  Synthetic: FXN 5 reverse 9:69036078-69036106; SaCas9
gccgcttccgccgggccgccct

SEQ ID NO: 48225 - DNA, 21 bp, Artificial Sequence
  Synthetic: FXN 5 reverse 9:69036079-69036106; SaCas9
ccgcttccgccgggccgccct

SEQ ID NO: 48226 - DNA, 20 bp, Artificial Sequence
  Synthetic: FXN 5 reverse 9:69036080-69036106; SaCas9
cgcttccgccgggccgccct

SEQ ID NO: 48227 - DNA, 19 bp, Artificial Sequence
  Synthetic: FXN 5 reverse 9:69036081-69036106; SaCas9
gcttccgccgggccgccct

SEQ ID NO: 48228 - DNA, 18 bp, Artificial Sequence
  Synthetic: FXN 5 reverse 9:69036082-69036106; SaCas9
cttccgccgggccgccct

SEQ ID NO: 48229 - DNA, 25 bp, Artificial Sequence
  Synthetic: FXN 5 reverse 9:69036077-69036108; SaCas9
gcaaggccgcttccgccgggccgcc

SEQ ID NO: 48230 - DNA, 24 bp, Artificial Sequence
  Synthetic: FXN 5 reverse 9:69036078-69036108; SaCas9
caaggccgcttccgccgggccgcc

SEQ ID NO: 48231 - DNA, 23 bp, Artificial Sequence
  Synthetic: FXN 5 reverse 9:69036079-69036108; SaCas9
aaggccgcttccgccgggccgcc

SEQ ID NO: 48232 - DNA, 22 bp, Artificial Sequence
  Synthetic: FXN 5 reverse 9:69036080-69036108; SaCas9
aggccgcttccgccgggccgcc

SEQ ID NO: 48233 - DNA, 21 bp, Artificial Sequence
  Synthetic: FXN 5 reverse 9:69036081-69036108; SaCas9
ggccgcttccgccgggccgcc

SEQ ID NO: 48234 - DNA, 20 bp, Artificial Sequence
  Synthetic: FXN 5 reverse 9:69036082-69036108; SaCas9
gccgcttccgccgggccgcc

SEQ ID NO: 48235 - DNA, 19 bp, Artificial Sequence
  Synthetic: FXN 5 reverse 9:69036083-69036108; SaCas9
ccgcttccgccgggccgcc

SEQ ID NO: 48236 - DNA, 18 bp, Artificial Sequence
  Synthetic: FXN 5 reverse 9:69036084-69036108; SaCas9
cgcttccgccgggccgcc

SEQ ID NO: 48237 - DNA, 25 bp, Artificial Sequence
  Synthetic: FXN 5 reverse 9:69036087-69036118; SaCas9
gaagggagttgcaaggccgcttccg

SEQ ID NO: 48238 - DNA, 24 bp, Artificial Sequence
  Synthetic: FXN 5 reverse 9:69036088-69036118; SaCas9
aagggagttgcaaggccgcttccg

SEQ ID NO: 48239 - DNA, 23 bp, Artificial Sequence
  Synthetic: FXN 5 reverse 9:69036089-69036118; SaCas9
agggagttgcaaggccgcttccg

SEQ ID NO: 48240 - DNA, 22 bp, Artificial Sequence
  Synthetic: FXN 5 reverse 9:69036090-69036118; SaCas9
gggagttgcaaggccgcttccg

SEQ ID NO: 48241 - DNA, 21 bp, Artificial Sequence
  Synthetic: FXN 5 reverse 9:69036091-69036118; SaCas9
ggagttgcaaggccgcttccg

SEQ ID NO: 48242 - DNA, 20 bp, Artificial Sequence
  Synthetic: FXN 5 reverse 9:69036092-69036118; SaCas9
gagttgcaaggccgcttccg

SEQ ID NO: 48243 - DNA, 19 bp, Artificial Sequence
  Synthetic: FXN 5 reverse 9:69036093-69036118; SaCas9
agttgcaaggccgcttccg

SEQ ID NO: 48244 - DNA, 18 bp, Artificial Sequence
  Synthetic: FXN 5 reverse 9:69036094-69036118; SaCas9
gttgcaaggccgcttccg

SEQ ID NO: 48245 - DNA, 25 bp, Artificial Sequence
  Synthetic: FXN 5 reverse 9:69036109-69036140; SaCas9
aaatgcaaccgggagaaccagagaa

SEQ ID NO: 48246 - DNA, 24 bp, Artificial Sequence
  Synthetic: FXN 5 reverse 9:69036110-69036140; SaCas9
aatgcaaccgggagaaccagagaa

SEQ ID NO: 48247 - DNA, 23 bp, Artificial Sequence
  Synthetic: FXN 5 reverse 9:69036111-69036140; SaCas9
atgcaaccgggagaaccagagaa

SEQ ID NO: 48248 - DNA, 22 bp, Artificial Sequence
  Synthetic: FXN 5 reverse 9:69036112-69036140; SaCas9
tgcaaccgggagaaccagagaa

SEQ ID NO: 48249 - DNA, 21 bp, Artificial Sequence
  Synthetic: FXN 5 reverse 9:69036113-69036140; SaCas9
gcaaccgggagaaccagagaa

SEQ ID NO: 48250 - DNA, 20 bp, Artificial Sequence
  Synthetic: FXN 5 reverse 9:69036114-69036140; SaCas9
caaccgggagaaccagagaa

SEQ ID NO: 48251 - DNA, 19 bp, Artificial Sequence
  Synthetic: FXN 5 reverse 9:69036115-69036140; SaCas9
aaccgggagaaccagagaa

SEQ ID NO: 48252 - DNA, 18 bp, Artificial Sequence
  Synthetic: FXN 5 reverse 9:69036116-69036140; SaCas9
accgggagaaccagagaa

SEQ ID NO: 48253 - DNA, 25 bp, Artificial Sequence
  Synthetic: FXN 5 reverse 9:69036110-69036141; SaCas9
taaatgcaaccgggagaaccagaga

SEQ ID NO: 48254 - DNA, 24 bp, Artificial Sequence
  Synthetic: FXN 5 reverse 9:69036111-69036141; SaCas9
aaatgcaaccgggagaaccagaga

SEQ ID NO: 48255 - DNA, 23 bp, Artificial Sequence
  Synthetic: FXN 5 reverse 9:69036112-69036141; SaCas9
aatgcaaccgggagaaccagaga

SEQ ID NO: 48256 - DNA, 22 bp, Artificial Sequence
  Synthetic: FXN 5 reverse 9:69036113-69036141; SaCas9
atgcaaccgggagaaccagaga

SEQ ID NO: 48257 - DNA, 21 bp, Artificial Sequence
  Synthetic: FXN 5 reverse 9:69036114-69036141; SaCas9
tgcaaccgggagaaccagaga

SEQ ID NO: 48258 - DNA, 20 bp, Artificial Sequence
  Synthetic: FXN 5 reverse 9:69036115-69036141; SaCas9
gcaaccgggagaaccagaga

SEQ ID NO: 48259 - DNA, 19 bp, Artificial Sequence
  Synthetic: FXN 5 reverse 9:69036116-69036141; SaCas9
caaccgggagaaccagaga

SEQ ID NO: 48260 - DNA, 18 bp, Artificial Sequence
  Synthetic: FXN 5 reverse 9:69036117-69036141; SaCas9
aaccgggagaaccagaga

SEQ ID NO: 48261 - DNA, 25 bp, Artificial Sequence
  Synthetic: FXN 5 reverse 9:69036111-69036142; SaCas9
gtaaatgcaaccgggagaaccagag

SEQ ID NO: 48262 - DNA, 24 bp, Artificial Sequence
  Synthetic: FXN 5 reverse 9:69036112-69036142; SaCas9
taaatgcaaccgggagaaccagag

SEQ ID NO: 48263 - DNA, 23 bp, Artificial Sequence
  Synthetic: FXN 5 reverse 9:69036113-69036142; SaCas9
aaatgcaaccgggagaaccagag

SEQ ID NO: 48264 - DNA, 22 bp, Artificial Sequence
  Synthetic: FXN 5 reverse 9:69036114-69036142; SaCas9
aatgcaaccgggagaaccagag

SEQ ID NO: 48265 - DNA, 21 bp, Artificial Sequence
  Synthetic: FXN 5 reverse 9:69036115-69036142; SaCas9
atgcaaccgggagaaccagag

SEQ ID NO: 48266 - DNA, 20 bp, Artificial Sequence
  Synthetic: FXN 5 reverse 9:69036116-69036142; SaCas9
tgcaaccgggagaaccagag

SEQ ID NO: 48267 - DNA, 19 bp, Artificial Sequence
  Synthetic: FXN 5 reverse 9:69036117-69036142; SaCas9
gcaaccgggagaaccagag

SEQ ID NO: 48268 - DNA, 18 bp, Artificial Sequence
  Synthetic: FXN 5 reverse 9:69036118-69036142; SaCas9
caaccgggagaaccagag

SEQ ID NO: 48269 - DNA, 25 bp, Artificial Sequence
  Synthetic: FXN 5 reverse 9:69036114-69036145; SaCas9
agtgtaaatgcaaccgggagaacca

SEQ ID NO: 48270 - DNA, 24 bp, Artificial Sequence
  Synthetic: FXN 5 reverse 9:69036115-69036145; SaCas9
gtgtaaatgcaaccgggagaacca

SEQ ID NO: 48271 - DNA, 23 bp, Artificial Sequence
  Synthetic: FXN 5 reverse 9:69036116-69036145; SaCas9
tgtaaatgcaaccgggagaacca

SEQ ID NO: 48272 - DNA, 22 bp, Artificial Sequence
  Synthetic: FXN 5 reverse 9:69036117-69036145; SaCas9
gtaaatgcaaccgggagaacca

SEQ ID NO: 48273 - DNA, 21 bp, Artificial Sequence
  Synthetic: FXN 5 reverse 9:69036118-69036145; SaCas9
taaatgcaaccgggagaacca

SEQ ID NO: 48274 - DNA, 20 bp, Artificial Sequence
  Synthetic: FXN 5 reverse 9:69036119-69036145; SaCas9
aaatgcaaccgggagaacca

SEQ ID NO: 48275 - DNA, 19 bp, Artificial Sequence
  Synthetic: FXN 5 reverse 9:69036120-69036145; SaCas9
aatgcaaccgggagaacca

SEQ ID NO: 48276 - DNA, 18 bp, Artificial Sequence
  Synthetic: FXN 5 reverse 9:69036121-69036145; SaCas9
atgcaaccgggagaacca

SEQ ID NO: 48277 - DNA, 25 bp, Artificial Sequence
  Synthetic: FXN 5 reverse 9:69036116-69036147; SaCas9
ccagtgtaaatgcaaccgggagaac

SEQ ID NO: 48278 - DNA, 24 bp, Artificial Sequence
  Synthetic: FXN 5 reverse 9:69036117-69036147; SaCas9
cagtgtaaatgcaaccgggagaac

SEQ ID NO: 48279 - DNA, 23 bp, Artificial Sequence
  Synthetic: FXN 5 reverse 9:69036118-69036147; SaCas9
agtgtaaatgcaaccgggagaac

SEQ ID NO: 48280 - DNA, 22 bp, Artificial Sequence
  Synthetic: FXN 5 reverse 9:69036119-69036147; SaCas9
gtgtaaatgcaaccgggagaac

SEQ ID NO: 48281 - DNA, 21 bp, Artificial Sequence
  Synthetic: FXN 5 reverse 9:69036120-69036147; SaCas9
tgtaaatgcaaccgggagaac

SEQ ID NO: 48282 - DNA, 20 bp, Artificial Sequence
  Synthetic: FXN 5 reverse 9:69036121-69036147; SaCas9
gtaaatgcaaccgggagaac

SEQ ID NO: 48283 - DNA, 19 bp, Artificial Sequence
  Synthetic: FXN 5 reverse 9:69036122-69036147; SaCas9
taaatgcaaccgggagaac

SEQ ID NO: 48284 - DNA, 18 bp, Artificial Sequence
  Synthetic: FXN 5 reverse 9:69036123-69036147; SaCas9
aaatgcaaccgggagaac

SEQ ID NO: 48285 - DNA, 25 bp, Artificial Sequence
  Synthetic: FXN 5 reverse 9:69036122-69036153; SaCas9
cagaagccagtgtaaatgcaaccgg

SEQ ID NO: 48286 - DNA, 24 bp, Artificial Sequence
  Synthetic: FXN 5 reverse 9:69036123-69036153; SaCas9
agaagccagtgtaaatgcaaccgg

SEQ ID NO: 48287 - DNA, 23 bp, Artificial Sequence
  Synthetic: FXN 5 reverse 9:69036124-69036153; SaCas9
gaagccagtgtaaatgcaaccgg

SEQ ID NO: 48288 - DNA, 22 bp, Artificial Sequence
  Synthetic: FXN 5 reverse 9:69036125-69036153; SaCas9
aagccagtgtaaatgcaaccgg

SEQ ID NO: 48289 - DNA, 21 bp, Artificial Sequence
  Synthetic: FXN 5 reverse 9:69036126-69036153; SaCas9
agccagtgtaaatgcaaccgg

SEQ ID NO: 48290 - DNA, 20 bp, Artificial Sequence
  Synthetic: FXN 5 reverse 9:69036127-69036153; SaCas9
gccagtgtaaatgcaaccgg

SEQ ID NO: 48291 - DNA, 19 bp, Artificial Sequence
  Synthetic: FXN 5 reverse 9:69036128-69036153; SaCas9
ccagtgtaaatgcaaccgg

SEQ ID NO: 48292 - DNA, 18 bp, Artificial Sequence
  Synthetic: FXN 5 reverse 9:69036129-69036153; SaCas9
cagtgtaaatgcaaccgg

SEQ ID NO: 48293 - DNA, 25 bp, Artificial Sequence
  Synthetic: FXN 5 reverse 9:69036124-69036155; SaCas9
agcagaagccagtgtaaatgcaacc

SEQ ID NO: 48294 - DNA, 24 bp, Artificial Sequence
  Synthetic: FXN 5 reverse 9:69036125-69036155; SaCas9
gcagaagccagtgtaaatgcaacc

SEQ ID NO: 48295 - DNA, 23 bp, Artificial Sequence
  Synthetic: FXN 5 reverse 9:69036126-69036155; SaCas9
cagaagccagtgtaaatgcaacc

SEQ ID NO: 48296 - DNA, 22 bp, Artificial Sequence
  Synthetic: FXN 5 reverse 9:69036127-69036155; SaCas9
agaagccagtgtaaatgcaacc

SEQ ID NO: 48297 - DNA, 21 bp, Artificial Sequence
  Synthetic: FXN 5 reverse 9:69036128-69036155; SaCas9
gaagccagtgtaaatgcaacc

SEQ ID NO: 48298 - DNA, 20 bp, Artificial Sequence
  Synthetic: FXN 5 reverse 9:69036129-69036155; SaCas9
aagccagtgtaaatgcaacc

SEQ ID NO: 48299 - DNA, 19 bp, Artificial Sequence
  Synthetic: FXN 5 reverse 9:69036130-69036155; SaCas9
agccagtgtaaatgcaacc

SEQ ID NO: 48300 - DNA, 18 bp, Artificial Sequence
  Synthetic: FXN 5 reverse 9:69036131-69036155; SaCas9
gccagtgtaaatgcaacc

SEQ ID NO: 48301 - DNA, 25 bp, Artificial Sequence
  Synthetic: FXN 5 reverse 9:69036125-69036156; SaCas9
aagcagaagccagtgtaaatgcaac

SEQ ID NO: 48302 - DNA, 24 bp, Artificial Sequence
  Synthetic: FXN 5 reverse 9:69036126-69036156; SaCas9
agcagaagccagtgtaaatgcaac

SEQ ID NO: 48303 - DNA, 23 bp, Artificial Sequence
  Synthetic: FXN 5 reverse 9:69036127-69036156; SaCas9
gcagaagccagtgtaaatgcaac

SEQ ID NO: 48304 - DNA, 22 bp, Artificial Sequence
  Synthetic: FXN 5 reverse 9:69036128-69036156; SaCas9
cagaagccagtgtaaatgcaac

SEQ ID NO: 48305 - DNA, 21 bp, Artificial Sequence
  Synthetic: FXN 5 reverse 9:69036129-69036156; SaCas9
agaagccagtgtaaatgcaac

SEQ ID NO: 48306 - DNA, 20 bp, Artificial Sequence
  Synthetic: FXN 5 reverse 9:69036130-69036156; SaCas9
gaagccagtgtaaatgcaac

SEQ ID NO: 48307 - DNA, 19 bp, Artificial Sequence
  Synthetic: FXN 5 reverse 9:69036131-69036156; SaCas9
aagccagtgtaaatgcaac

SEQ ID NO: 48308 - DNA, 18 bp, Artificial Sequence
  Synthetic: FXN 5 reverse 9:69036132-69036156; SaCas9
agccagtgtaaatgcaac

SEQ ID NO: 48309 - DNA, 25 bp, Artificial Sequence
  Synthetic: FXN 5 reverse 9:69036126-69036157; SaCas9
aaagcagaagccagtgtaaatgcaa

SEQ ID NO: 48310 - DNA, 24 bp, Artificial Sequence
  Synthetic: FXN 5 reverse 9:69036127-69036157; SaCas9
aagcagaagccagtgtaaatgcaa

SEQ ID NO: 48311 - DNA, 23 bp, Artificial Sequence
  Synthetic: FXN 5 reverse 9:69036128-69036157; SaCas9
agcagaagccagtgtaaatgcaa

SEQ ID NO: 48312 - DNA, 22 bp, Artificial Sequence
  Synthetic: FXN 5 reverse 9:69036129-69036157; SaCas9
gcagaagccagtgtaaatgcaa

SEQ ID NO: 48313 - DNA, 21 bp, Artificial Sequence
  Synthetic: FXN 5 reverse 9:69036130-69036157; SaCas9
cagaagccagtgtaaatgcaa

SEQ ID NO: 48314 - DNA, 20 bp, Artificial Sequence
  Synthetic: FXN 5 reverse 9:69036131-69036157; SaCas9
agaagccagtgtaaatgcaa

SEQ ID NO: 48315 - DNA, 19 bp, Artificial Sequence
  Synthetic: FXN 5 reverse 9:69036132-69036157; SaCas9
gaagccagtgtaaatgcaa

SEQ ID NO: 48316 - DNA, 18 bp, Artificial Sequence
  Synthetic: FXN 5 reverse 9:69036133-69036157; SaCas9
aagccagtgtaaatgcaa

SEQ ID NO: 48317 - DNA, 25 bp, Artificial Sequence
  Synthetic: FXN 5 forward 9:69036132-69036163; SaCas9
ttgcatttacactggcttctgcttt

SEQ ID NO: 48318 - DNA, 24 bp, Artificial Sequence
  Synthetic: FXN 5 forward 9:69036133-69036163; SaCas9
tgcatttacactggcttctgcttt

SEQ ID NO: 48319 - DNA, 23 bp, Artificial Sequence
  Synthetic: FXN 5 forward 9:69036134-69036163; SaCas9
gcatttacactggcttctgcttt

SEQ ID NO: 48320 - DNA, 22 bp, Artificial Sequence
  Synthetic: FXN 5 forward 9:69036135-69036163; SaCas9
catttacactggcttctgcttt

SEQ ID NO: 48321 - DNA, 21 bp, Artificial Sequence
  Synthetic: FXN 5 forward 9:69036136-69036163; SaCas9
atttacactggcttctgcttt

SEQ ID NO: 48322 - DNA, 20 bp, Artificial Sequence
  Synthetic: FXN 5 forward 9:69036137-69036163; SaCas9
tttacactggcttctgcttt

SEQ ID NO: 48323 - DNA, 19 bp, Artificial Sequence
  Synthetic: FXN 5 forward 9:69036138-69036163; SaCas9
ttacactggcttctgcttt

SEQ ID NO: 48324 - DNA, 18 bp, Artificial Sequence
  Synthetic: FXN 5 forward 9:69036139-69036163; SaCas9
tacactggcttctgcttt

SEQ ID NO: 48325 - DNA, 25 bp, Artificial Sequence
  Synthetic: FXN 5 forward 9:69036135-69036166; SaCas9
catttacactggcttctgctttccg

SEQ ID NO: 48326 - DNA, 24 bp, Artificial Sequence
  Synthetic: FXN 5 forward 9:69036136-69036166; SaCas9
atttacactggcttctgctttccg

SEQ ID NO: 48327 - DNA, 23 bp, Artificial Sequence
  Synthetic: FXN 5 forward 9:69036137-69036166; SaCas9
tttacactggcttctgctttccg

SEQ ID NO: 48328 - DNA, 22 bp, Artificial Sequence
  Synthetic: FXN 5 forward 9:69036138-69036166; SaCas9
ttacactggcttctgctttccg

SEQ ID NO: 48329 - DNA, 21 bp, Artificial Sequence
  Synthetic: FXN 5 forward 9:69036139-69036166; SaCas9
tacactggcttctgctttccg

SEQ ID NO: 48330 - DNA, 20 bp, Artificial Sequence
  Synthetic: FXN 5 forward 9:69036140-69036166; SaCas9
acactggcttctgctttccg

SEQ ID NO: 48331 - DNA, 19 bp, Artificial Sequence
  Synthetic: FXN 5 forward 9:69036141-69036166; SaCas9
cactggcttctgctttccg

SEQ ID NO: 48332 - DNA, 18 bp, Artificial Sequence
  Synthetic: FXN 5 forward 9:69036142-69036166; SaCas9
actggcttctgctttccg

SEQ ID NO: 48333 - DNA, 25 bp, Artificial Sequence
  Synthetic: FXN 5 forward 9:69036136-69036167; SaCas9
atttacactggcttctgctttccga

SEQ ID NO: 48334 - DNA, 24 bp, Artificial Sequence
  Synthetic: FXN 5 forward 9:69036137-69036167; SaCas9
tttacactggcttctgctttccga

SEQ ID NO: 48335 - DNA, 23 bp, Artificial Sequence
  Synthetic: FXN 5 forward 9:69036138-69036167; SaCas9
ttacactggcttctgctttccga

SEQ ID NO: 48336 - DNA, 22 bp, Artificial Sequence
  Synthetic: FXN 5 forward 9:69036139-69036167; SaCas9
tacactggcttctgctttccga

SEQ ID NO: 48337 - DNA, 21 bp, Artificial Sequence
  Synthetic: FXN 5 forward 9:69036140-69036167; SaCas9
acactggcttctgctttccga

SEQ ID NO: 48338 - DNA, 20 bp, Artificial Sequence
  Synthetic: FXN 5 forward 9:69036141-69036167; SaCas9
cactggcttctgctttccga

SEQ ID NO: 48339 - DNA, 19 bp, Artificial Sequence
  Synthetic: FXN 5 forward 9:69036142-69036167; SaCas9
actggcttctgctttccga

SEQ ID NO: 48340 - DNA, 18 bp, Artificial Sequence
  Synthetic: FXN 5 forward 9:69036143-69036167; SaCas9
ctggcttctgctttccga

SEQ ID NO: 48341 - DNA, 25 bp, Artificial Sequence
  Synthetic: FXN 5 forward 9:69036141-69036172; SaCas9
cactggcttctgctttccgaaggaa

SEQ ID NO: 48342 - DNA, 24 bp, Artificial Sequence
  Synthetic: FXN 5 forward 9:69036142-69036172; SaCas9
actggcttctgctttccgaaggaa

SEQ ID NO: 48343 - DNA, 23 bp, Artificial Sequence
  Synthetic: FXN 5 forward 9:69036143-69036172; SaCas9
ctggcttctgctttccgaaggaa

SEQ ID NO: 48344 - DNA, 22 bp, Artificial Sequence
  Synthetic: FXN 5 forward 9:69036144-69036172; SaCas9
tggcttctgctttccgaaggaa

SEQ ID NO: 48345 - DNA, 21 bp, Artificial Sequence
  Synthetic: FXN 5 forward 9:69036145-69036172; SaCas9
ggcttctgctttccgaaggaa

SEQ ID NO: 48346 - DNA, 20 bp, Artificial Sequence
  Synthetic: FXN 5 forward 9:69036146-69036172; SaCas9
gcttctgctttccgaaggaa

SEQ ID NO: 48347 - DNA, 19 bp, Artificial Sequence
  Synthetic: FXN 5 forward 9:69036147-69036172; SaCas9
cttctgctttccgaaggaa

SEQ ID NO: 48348 - DNA, 18 bp, Artificial Sequence
  Synthetic: FXN 5 forward 9:69036148-69036172; SaCas9
ttctgctttccgaaggaa

SEQ ID NO: 48349 - DNA, 25 bp, Artificial Sequence
  Synthetic: FXN 5 forward 9:69036142-69036173; SaCas9
actggcttctgctttccgaaggaaa

SEQ ID NO: 48350 - DNA, 24 bp, Artificial Sequence
  Synthetic: FXN 5 forward 9:69036143-69036173; SaCas9
ctggcttctgctttccgaaggaaa

SEQ ID NO: 48351 - DNA, 23 bp, Artificial Sequence
  Synthetic: FXN 5 forward 9:69036144-69036173; SaCas9
tggcttctgctttccgaaggaaa

SEQ ID NO: 48352 - DNA, 22 bp, Artificial Sequence
  Synthetic: FXN 5 forward 9:69036145-69036173; SaCas9
ggcttctgctttccgaaggaaa

SEQ ID NO: 48353 - DNA, 21 bp, Artificial Sequence
  Synthetic: FXN 5 forward 9:69036146-69036173; SaCas9
gcttctgctttccgaaggaaa

SEQ ID NO: 48354 - DNA, 20 bp, Artificial Sequence
  Synthetic: FXN 5 forward 9:69036147-69036173; SaCas9
cttctgctttccgaaggaaa

SEQ ID NO: 48355 - DNA, 19 bp, Artificial Sequence
  Synthetic: FXN 5 forward 9:69036148-69036173; SaCas9
ttctgctttccgaaggaaa

SEQ ID NO: 48356 - DNA, 18 bp, Artificial Sequence
  Synthetic: FXN 5 forward 9:69036149-69036173; SaCas9
tctgctttccgaaggaaa

SEQ ID NO: 48357 - DNA, 25 bp, Artificial Sequence
  Synthetic: FXN 5 forward 9:69036143-69036174; SaCas9
ctggcttctgctttccgaaggaaaa

SEQ ID NO: 48358 - DNA, 24 bp, Artificial Sequence
  Synthetic: FXN 5 forward 9:69036144-69036174; SaCas9
tggcttctgctttccgaaggaaaa

SEQ ID NO: 48359 - DNA, 23 bp, Artificial Sequence
  Synthetic: FXN 5 forward 9:69036145-69036174; SaCas9
ggcttctgctttccgaaggaaaa

SEQ ID NO: 48360 - DNA, 22 bp, Artificial Sequence
  Synthetic: FXN 5 forward 9:69036146-69036174; SaCas9
gcttctgctttccgaaggaaaa

SEQ ID NO: 48361 - DNA, 21 bp, Artificial Sequence
  Synthetic: FXN 5 forward 9:69036147-69036174; SaCas9
cttctgctttccgaaggaaaa

SEQ ID NO: 48362 - DNA, 20 bp, Artificial Sequence
  Synthetic: FXN 5 forward 9:69036148-69036174; SaCas9
ttctgctttccgaaggaaaa

SEQ ID NO: 48363 - DNA, 19 bp, Artificial Sequence
  Synthetic: FXN 5 forward 9:69036149-69036174; SaCas9
tctgctttccgaaggaaaa

SEQ ID NO: 48364 - DNA, 18 bp, Artificial Sequence
  Synthetic: FXN 5 forward 9:69036150-69036174; SaCas9
ctgctttccgaaggaaaa

SEQ ID NO: 48365 - DNA, 25 bp, Artificial Sequence
  Synthetic: FXN 5 reverse 9:69036147-69036178; SaCas9
aaatgtccccttttccttcggaaag

SEQ ID NO: 48366 - DNA, 24 bp, Artificial Sequence
  Synthetic: FXN 5 reverse 9:69036148-69036178; SaCas9
aatgtccccttttccttcggaaag

SEQ ID NO: 48367 - DNA, 23 bp, Artificial Sequence
  Synthetic: FXN 5 reverse 9:69036149-69036178; SaCas9
atgtccccttttccttcggaaag

SEQ ID NO: 48368 - DNA, 22 bp, Artificial Sequence
  Synthetic: FXN 5 reverse 9:69036150-69036178; SaCas9
tgtccccttttccttcggaaag

SEQ ID NO: 48369 - DNA, 21 bp, Artificial Sequence
  Synthetic: FXN 5 reverse 9:69036151-69036178; SaCas9
gtccccttttccttcggaaag

SEQ ID NO: 48370 - DNA, 20 bp, Artificial Sequence
  Synthetic: FXN 5 reverse 9:69036152-69036178; SaCas9
tccccttttccttcggaaag

SEQ ID NO: 48371 - DNA, 19 bp, Artificial Sequence
  Synthetic: FXN 5 reverse 9:69036153-69036178; SaCas9
ccccttttccttcggaaag

SEQ ID NO: 48372 - DNA, 18 bp, Artificial Sequence
  Synthetic: FXN 5 reverse 9:69036154-69036178; SaCas9
cccttttccttcggaaag

SEQ ID NO: 48373 - DNA, 25 bp, Artificial Sequence
  Synthetic: FXN 5 reverse 9:69036154-69036185; SaCas9
caggacaaaatgtccccttttcctt

SEQ ID NO: 48374 - DNA, 24 bp, Artificial Sequence
  Synthetic: FXN 5 reverse 9:69036155-69036185; SaCas9
aggacaaaatgtccccttttcctt

SEQ ID NO: 48375 - DNA, 23 bp, Artificial Sequence
  Synthetic: FXN 5 reverse 9:69036156-69036185; SaCas9
ggacaaaatgtccccttttcctt

SEQ ID NO: 48376 - DNA, 22 bp, Artificial Sequence
  Synthetic: FXN 5 reverse 9:69036157-69036185; SaCas9
gacaaaatgtccccttttcctt

SEQ ID NO: 48377 - DNA, 21 bp, Artificial Sequence
  Synthetic: FXN 5 reverse 9:69036158-69036185; SaCas9
acaaaatgtccccttttcctt

SEQ ID NO: 48378 - DNA, 20 bp, Artificial Sequence
  Synthetic: FXN 5 reverse 9:69036159-69036185; SaCas9
caaaatgtccccttttcctt

SEQ ID NO: 48379 - DNA, 19 bp, Artificial Sequence
  Synthetic: FXN 5 reverse 9:69036160-69036185; SaCas9
aaaatgtccccttttcctt

SEQ ID NO: 48380 - DNA, 18 bp, Artificial Sequence
  Synthetic: FXN 5 reverse 9:69036161-69036185; SaCas9
aaatgtccccttttcctt

SEQ ID NO: 48381 - DNA, 25 bp, Artificial Sequence
  Synthetic: FXN 5 reverse 9:69036155-69036186; SaCas9
gcaggacaaaatgtccccttttcct

SEQ ID NO: 48382 - DNA, 24 bp, Artificial Sequence
  Synthetic: FXN 5 reverse 9:69036156-69036186; SaCas9
caggacaaaatgtccccttttcct

SEQ ID NO: 48383 - DNA, 23 bp, Artificial Sequence
  Synthetic: FXN 5 reverse 9:69036157-69036186; SaCas9
aggacaaaatgtccccttttcct

SEQ ID NO: 48384 - DNA, 22 bp, Artificial Sequence
  Synthetic: FXN 5 reverse 9:69036158-69036186; SaCas9
ggacaaaatgtccccttttcct

SEQ ID NO: 48385 - DNA, 21 bp, Artificial Sequence
  Synthetic: FXN 5 reverse 9:69036159-69036186; SaCas9
gacaaaatgtccccttttcct

SEQ ID NO: 48386 - DNA, 20 bp, Artificial Sequence
  Synthetic: FXN 5 reverse 9:69036160-69036186; SaCas9
acaaaatgtccccttttcct

SEQ ID NO: 48387 - DNA, 19 bp, Artificial Sequence
  Synthetic: FXN 5 reverse 9:69036161-69036186; SaCas9
caaaatgtccccttttcct

SEQ ID NO: 48388 - DNA, 18 bp, Artificial Sequence
  Synthetic: FXN 5 reverse 9:69036162-69036186; SaCas9
aaaatgtccccttttcct

SEQ ID NO: 48389 - DNA, 25 bp, Artificial Sequence
  Synthetic: FXN 5 forward 9:69036170-69036201; SaCas9
ggacattttgtcctgcggtgcgact

SEQ ID NO: 48390 - DNA, 24 bp, Artificial Sequence
  Synthetic: FXN 5 forward 9:69036171-69036201; SaCas9
gacattttgtcctgcggtgcgact

SEQ ID NO: 48391 - DNA, 23 bp, Artificial Sequence
  Synthetic: FXN 5 forward 9:69036172-69036201; SaCas9
acattttgtcctgcggtgcgact

SEQ ID NO: 48392 - DNA, 22 bp, Artificial Sequence
  Synthetic: FXN 5 forward 9:69036173-69036201; SaCas9
cattttgtcctgcggtgcgact

SEQ ID NO: 48393 - DNA, 21 bp, Artificial Sequence
  Synthetic: FXN 5 forward 9:69036174-69036201; SaCas9
attttgtcctgcggtgcgact

SEQ ID NO: 48394 - DNA, 20 bp, Artificial Sequence
  Synthetic: FXN 5 forward 9:69036175-69036201; SaCas9
ttttgtcctgcggtgcgact

SEQ ID NO: 48395 - DNA, 19 bp, Artificial Sequence
  Synthetic: FXN 5 forward 9:69036176-69036201; SaCas9
tttgtcctgcggtgcgact

SEQ ID NO: 48396 - DNA, 18 bp, Artificial Sequence
  Synthetic: FXN 5 forward 9:69036177-69036201; SaCas9
ttgtcctgcggtgcgact

SEQ ID NO: 48397 - DNA, 25 bp, Artificial Sequence
  Synthetic: FXN 5 reverse 9:69036179-69036210; SaCas9
cgtgccttgacccgcagtcgcaccg

SEQ ID NO: 48398 - DNA, 24 bp, Artificial Sequence
  Synthetic: FXN 5 reverse 9:69036180-69036210; SaCas9
gtgccttgacccgcagtcgcaccg

SEQ ID NO: 48399 - DNA, 23 bp, Artificial Sequence
  Synthetic: FXN 5 reverse 9:69036181-69036210; SaCas9
tgccttgacccgcagtcgcaccg

SEQ ID NO: 48400 - DNA, 22 bp, Artificial Sequence
  Synthetic: FXN 5 reverse 9:69036182-69036210; SaCas9
gccttgacccgcagtcgcaccg

SEQ ID NO: 48401 - DNA, 21 bp, Artificial Sequence
  Synthetic: FXN 5 reverse 9:69036183-69036210; SaCas9
ccttgacccgcagtcgcaccg

SEQ ID NO: 48402 - DNA, 20 bp, Artificial Sequence
  Synthetic: FXN 5 reverse 9:69036184-69036210; SaCas9
cttgacccgcagtcgcaccg

SEQ ID NO: 48403 - DNA, 19 bp, Artificial Sequence
  Synthetic: FXN 5 reverse 9:69036185-69036210; SaCas9
ttgacccgcagtcgcaccg

SEQ ID NO: 48404 - DNA, 18 bp, Artificial Sequence
  Synthetic: FXN 5 reverse 9:69036186-69036210; SaCas9
tgacccgcagtcgcaccg

SEQ ID NO: 48405 - DNA, 25 bp, Artificial Sequence
  Synthetic: FXN 5 forward 9:69036182-69036213; SaCas9
ctgcggtgcgactgcgggtcaaggc

SEQ ID NO: 48406 - DNA, 24 bp, Artificial Sequence
  Synthetic: FXN 5 forward 9:69036183-69036213; SaCas9
tgcggtgcgactgcgggtcaaggc

SEQ ID NO: 48407 - DNA, 23 bp, Artificial Sequence
  Synthetic: FXN 5 forward 9:69036184-69036213; SaCas9
gcggtgcgactgcgggtcaaggc

SEQ ID NO: 48408 - DNA, 22 bp, Artificial Sequence
  Synthetic: FXN 5 forward 9:69036185-69036213; SaCas9
cggtgcgactgcgggtcaaggc

SEQ ID NO: 48409 - DNA, 21 bp, Artificial Sequence
  Synthetic: FXN 5 forward 9:69036186-69036213; SaCas9
ggtgcgactgcgggtcaaggc

SEQ ID NO: 48410 - DNA, 20 bp, Artificial Sequence
  Synthetic: FXN 5 forward 9:69036187-69036213; SaCas9
gtgcgactgcgggtcaaggc

SEQ ID NO: 48411 - DNA, 19 bp, Artificial Sequence
  Synthetic: FXN 5 forward 9:69036188-69036213; SaCas9
tgcgactgcgggtcaaggc

SEQ ID NO: 48412 - DNA, 18 bp, Artificial Sequence
  Synthetic: FXN 5 forward 9:69036189-69036213; SaCas9
gcgactgcgggtcaaggc

SEQ ID NO: 48413 - DNA, 25 bp, Artificial Sequence
  Synthetic: FXN 5 forward 9:69036186-69036217; SaCas9
ggtgcgactgcgggtcaaggcacgg

SEQ ID NO: 48414 - DNA, 24 bp, Artificial Sequence
  Synthetic: FXN 5 forward 9:69036187-69036217; SaCas9
gtgcgactgcgggtcaaggcacgg

SEQ ID NO: 48415 - DNA, 23 bp, Artificial Sequence
  Synthetic: FXN 5 forward 9:69036188-69036217; SaCas9
tgcgactgcgggtcaaggcacgg

SEQ ID NO: 48416 - DNA, 22 bp, Artificial Sequence
  Synthetic: FXN 5 forward 9:69036189-69036217; SaCas9
gcgactgcgggtcaaggcacgg

SEQ ID NO: 48417 - DNA, 21 bp, Artificial Sequence
  Synthetic: FXN 5 forward 9:69036190-69036217; SaCas9
cgactgcgggtcaaggcacgg

SEQ ID NO: 48418 - DNA, 20 bp, Artificial Sequence
  Synthetic: FXN 5 forward 9:69036191-69036217; SaCas9
gactgcgggtcaaggcacgg

SEQ ID NO: 48419 - DNA, 19 bp, Artificial Sequence
  Synthetic: FXN 5 forward 9:69036192-69036217; SaCas9
actgcgggtcaaggcacgg

SEQ ID NO: 48420 - DNA, 18 bp, Artificial Sequence
  Synthetic: FXN 5 forward 9:69036193-69036217; SaCas9
ctgcgggtcaaggcacgg

SEQ ID NO: 48421 - DNA, 25 bp, Artificial Sequence
  Synthetic: FXN 5 forward 9:69036193-69036224; SaCas9
ctgcgggtcaaggcacgggcgaagg

SEQ ID NO: 48422 - DNA, 24 bp, Artificial Sequence
  Synthetic: FXN 5 forward 9:69036194-69036224; SaCas9
tgcgggtcaaggcacgggcgaagg

SEQ ID NO: 48423 - DNA, 23 bp, Artificial Sequence
  Synthetic: FXN 5 forward 9:69036195-69036224; SaCas9
gcgggtcaaggcacgggcgaagg

SEQ ID NO: 48424 - DNA, 22 bp, Artificial Sequence
  Synthetic: FXN 5 forward 9:69036196-69036224; SaCas9
cgggtcaaggcacgggcgaagg

SEQ ID NO: 48425 - DNA, 21 bp, Artificial Sequence
  Synthetic: FXN 5 forward 9:69036197-69036224; SaCas9
gggtcaaggcacgggcgaagg

SEQ ID NO: 48426 - DNA, 20 bp, Artificial Sequence
  Synthetic: FXN 5 forward 9:69036198-69036224; SaCas9
ggtcaaggcacgggcgaagg

SEQ ID NO: 48427 - DNA, 19 bp, Artificial Sequence
  Synthetic: FXN 5 forward 9:69036199-69036224; SaCas9
gtcaaggcacgggcgaagg

SEQ ID NO: 48428 - DNA, 18 bp, Artificial Sequence
  Synthetic: FXN 5 forward 9:69036200-69036224; SaCas9
tcaaggcacgggcgaagg

SEQ ID NO: 48429 - DNA, 25 bp, Artificial Sequence
  Synthetic: FXN 5 forward 9:69036205-69036236; SaCas9
gcacgggcgaaggcagggcaggctg

SEQ ID NO: 48430 - DNA, 24 bp, Artificial Sequence
  Synthetic: FXN 5 forward 9:69036206-69036236; SaCas9
cacgggcgaaggcagggcaggctg

SEQ ID NO: 48431 - DNA, 23 bp, Artificial Sequence
  Synthetic: FXN 5 forward 9:69036207-69036236; SaCas9
acgggcgaaggcagggcaggctg

SEQ ID NO: 48432 - DNA, 22 bp, Artificial Sequence
  Synthetic: FXN 5 forward 9:69036208-69036236; SaCas9
cgggcgaaggcagggcaggctg

SEQ ID NO: 48433 - DNA, 21 bp, Artificial Sequence
  Synthetic: FXN 5 forward 9:69036209-69036236; SaCas9
gggcgaaggcagggcaggctg

SEQ ID NO: 48434 - DNA, 20 bp, Artificial Sequence
  Synthetic: FXN 5 forward 9:69036210-69036236; SaCas9
ggcgaaggcagggcaggctg

SEQ ID NO: 48435 - DNA, 19 bp, Artificial Sequence
  Synthetic: FXN 5 forward 9:69036211-69036236; SaCas9
gcgaaggcagggcaggctg

SEQ ID NO: 48436 - DNA, 18 bp, Artificial Sequence
  Synthetic: FXN 5 forward 9:69036212-69036236; SaCas9
cgaaggcagggcaggctg

SEQ ID NO: 48437 - DNA, 25 bp, Artificial Sequence
  Synthetic: FXN 5 forward 9:69036206-69036237; SaCas9
cacgggcgaaggcagggcaggctgg

SEQ ID NO: 48438 - DNA, 24 bp, Artificial Sequence
  Synthetic: FXN 5 forward 9:69036207-69036237; SaCas9
acgggcgaaggcagggcaggctgg

SEQ ID NO: 48439 - DNA, 23 bp, Artificial Sequence
  Synthetic: FXN 5 forward 9:69036208-69036237; SaCas9
cgggcgaaggcagggcaggctgg

SEQ ID NO: 48440 - DNA, 22 bp, Artificial Sequence
  Synthetic: FXN 5 forward 9:69036209-69036237; SaCas9
gggcgaaggcagggcaggctgg

SEQ ID NO: 48441 - DNA, 21 bp, Artificial Sequence
  Synthetic: FXN 5 forward 9:69036210-69036237; SaCas9
ggcgaaggcagggcaggctgg

SEQ ID NO: 48442 - DNA, 20 bp, Artificial Sequence
  Synthetic: FXN 5 forward 9:69036211-69036237; SaCas9
gcgaaggcagggcaggctgg

SEQ ID NO: 48443 - DNA, 19 bp, Artificial Sequence
  Synthetic: FXN 5 forward 9:69036212-69036237; SaCas9
cgaaggcagggcaggctgg

SEQ ID NO: 48444 - DNA, 18 bp, Artificial Sequence
  Synthetic: FXN 5 forward 9:69036213-69036237; SaCas9
gaaggcagggcaggctgg

SEQ ID NO: 48445 - DNA, 25 bp, Artificial Sequence
  Synthetic: FXN 5 forward 9:69036208-69036239; SaCas9
cgggcgaaggcagggcaggctggtg

SEQ ID NO: 48446 - DNA, 24 bp, Artificial Sequence
  Synthetic: FXN 5 forward 9:69036209-69036239; SaCas9
gggcgaaggcagggcaggctggtg

SEQ ID NO: 48447 - DNA, 23 bp, Artificial Sequence
  Synthetic: FXN 5 forward 9:69036210-69036239; SaCas9
ggcgaaggcagggcaggctggtg

SEQ ID NO: 48448 - DNA, 22 bp, Artificial Sequence
  Synthetic: FXN 5 forward 9:69036211-69036239; SaCas9
gcgaaggcagggcaggctggtg

SEQ ID NO: 48449 - DNA, 21 bp, Artificial Sequence
  Synthetic: FXN 5 forward 9:69036212-69036239; SaCas9
cgaaggcagggcaggctggtg

SEQ ID NO: 48450 - DNA, 20 bp, Artificial Sequence
  Synthetic: FXN 5 forward 9:69036213-69036239; SaCas9
gaaggcagggcaggctggtg

SEQ ID NO: 48451 - DNA, 19 bp, Artificial Sequence
  Synthetic: FXN 5 forward 9:69036214-69036239; SaCas9
aaggcagggcaggctggtg

SEQ ID NO: 48452 - DNA, 18 bp, Artificial Sequence
  Synthetic: FXN 5 forward 9:69036215-69036239; SaCas9
aggcagggcaggctggtg

SEQ ID NO: 48453 - DNA, 25 bp, Artificial Sequence
  Synthetic: FXN 5 forward 9:69036209-69036240; SaCas9
gggcgaaggcagggcaggctggtgg

SEQ ID NO: 48454 - DNA, 24 bp, Artificial Sequence
  Synthetic: FXN 5 forward 9:69036210-69036240; SaCas9
ggcgaaggcagggcaggctggtgg

SEQ ID NO: 48455 - DNA, 23 bp, Artificial Sequence
  Synthetic: FXN 5 forward 9:69036211-69036240; SaCas9
gcgaaggcagggcaggctggtgg

SEQ ID NO: 48456 - DNA, 22 bp, Artificial Sequence
  Synthetic: FXN 5 forward 9:69036212-69036240; SaCas9
cgaaggcagggcaggctggtgg

SEQ ID NO: 48457 - DNA, 21 bp, Artificial Sequence
  Synthetic: FXN 5 forward 9:69036213-69036240; SaCas9
gaaggcagggcaggctggtgg

SEQ ID NO: 48458 - DNA, 20 bp, Artificial Sequence
  Synthetic: FXN 5 forward 9:69036214-69036240; SaCas9
aaggcagggcaggctggtgg

SEQ ID NO: 48459 - DNA, 19 bp, Artificial Sequence
  Synthetic: FXN 5 forward 9:69036215-69036240; SaCas9
aggcagggcaggctggtgg

SEQ ID NO: 48460 - DNA, 18 bp, Artificial Sequence
  Synthetic: FXN 5 forward 9:69036216-69036240; SaCas9
ggcagggcaggctggtgg

SEQ ID NO: 48461 - DNA, 25 bp, Artificial Sequence
  Synthetic: FXN 5 forward 9:69036210-69036241; SaCas9
ggcgaaggcagggcaggctggtgga

SEQ ID NO: 48462 - DNA, 24 bp, Artificial Sequence
  Synthetic: FXN 5 forward 9:69036211-69036241; SaCas9
gcgaaggcagggcaggctggtgga

SEQ ID NO: 48463 - DNA, 23 bp, Artificial Sequence
  Synthetic: FXN 5 forward 9:69036212-69036241; SaCas9
cgaaggcagggcaggctggtgga

SEQ ID NO: 48464 - DNA, 22 bp, Artificial Sequence
  Synthetic: FXN 5 forward 9:69036213-69036241; SaCas9
gaaggcagggcaggctggtgga

SEQ ID NO: 48465 - DNA, 21 bp, Artificial Sequence
  Synthetic: FXN 5 forward 9:69036214-69036241; SaCas9
aaggcagggcaggctggtgga

SEQ ID NO: 48466 - DNA, 20 bp, Artificial Sequence
  Synthetic: FXN 5 forward 9:69036215-69036241; SaCas9
aggcagggcaggctggtgga

SEQ ID NO: 48467 - DNA, 19 bp, Artificial Sequence
  Synthetic: FXN 5 forward 9:69036216-69036241; SaCas9
ggcagggcaggctggtgga

SEQ ID NO: 48468 - DNA, 18 bp, Artificial Sequence
  Synthetic: FXN 5 forward 9:69036217-69036241; SaCas9
gcagggcaggctggtgga

SEQ ID NO: 48469 - DNA, 25 bp, Artificial Sequence
  Synthetic: FXN 5 forward 9:69036221-69036252; SaCas9
ggcaggctggtggaggggaccggtt

SEQ ID NO: 48470 - DNA, 24 bp, Artificial Sequence
  Synthetic: FXN 5 forward 9:69036222-69036252; SaCas9
gcaggctggtggaggggaccggtt

SEQ ID NO: 48471 - DNA, 23 bp, Artificial Sequence
  Synthetic: FXN 5 forward 9:69036223-69036252; SaCas9
caggctggtggaggggaccggtt

SEQ ID NO: 48472 - DNA, 22 bp, Artificial Sequence
  Synthetic: FXN 5 forward 9:69036224-69036252; SaCas9
aggctggtggaggggaccggtt

SEQ ID NO: 48473 - DNA, 21 bp, Artificial Sequence
  Synthetic: FXN 5 forward 9:69036225-69036252; SaCas9
ggctggtggaggggaccggtt

SEQ ID NO: 48474 - DNA, 20 bp, Artificial Sequence
  Synthetic: FXN 5 forward 9:69036226-69036252; SaCas9
gctggtggaggggaccggtt

SEQ ID NO: 48475 - DNA, 19 bp, Artificial Sequence
  Synthetic: FXN 5 forward 9:69036227-69036252; SaCas9
ctggtggaggggaccggtt

SEQ ID NO: 48476 - DNA, 18 bp, Artificial Sequence
  Synthetic: FXN 5 forward 9:69036228-69036252; SaCas9
tggtggaggggaccggtt

SEQ ID NO: 48477 - DNA, 25 bp, Artificial Sequence
  Synthetic: FXN 5 forward 9:69036223-69036254; SaCas9
caggctggtggaggggaccggttcc

SEQ ID NO: 48478 - DNA, 24 bp, Artificial Sequence
  Synthetic: FXN 5 forward 9:69036224-69036254; SaCas9
aggctggtggaggggaccggttcc

SEQ ID NO: 48479 - DNA, 23 bp, Artificial Sequence
  Synthetic: FXN 5 forward 9:69036225-69036254; SaCas9
ggctggtggaggggaccggttcc

SEQ ID NO: 48480 - DNA, 22 bp, Artificial Sequence
  Synthetic: FXN 5 forward 9:69036226-69036254; SaCas9
gctggtggaggggaccggttcc

SEQ ID NO: 48481 - DNA, 21 bp, Artificial Sequence
  Synthetic: FXN 5 forward 9:69036227-69036254; SaCas9
ctggtggaggggaccggttcc

SEQ ID NO: 48482 - DNA, 20 bp, Artificial Sequence
  Synthetic: FXN 5 forward 9:69036228-69036254; SaCas9
tggtggaggggaccggttcc

SEQ ID NO: 48483 - DNA, 19 bp, Artificial Sequence
  Synthetic: FXN 5 forward 9:69036229-69036254; SaCas9
ggtggaggggaccggttcc

SEQ ID NO: 48484 - DNA, 18 bp, Artificial Sequence
  Synthetic: FXN 5 forward 9:69036230-69036254; SaCas9
gtggaggggaccggttcc

SEQ ID NO: 48485 - DNA, 25 bp, Artificial Sequence
  Synthetic: FXN 5 forward 9:69036224-69036255; SaCas9
aggctggtggaggggaccggttccg

SEQ ID NO: 48486 - DNA, 24 bp, Artificial Sequence
  Synthetic: FXN 5 forward 9:69036225-69036255; SaCas9
ggctggtggaggggaccggttccg

SEQ ID NO: 48487 - DNA, 23 bp, Artificial Sequence
  Synthetic: FXN 5 forward 9:69036226-69036255; SaCas9
gctggtggaggggaccggttccg

SEQ ID NO: 48488 - DNA, 22 bp, Artificial Sequence
  Synthetic: FXN 5 forward 9:69036227-69036255; SaCas9
ctggtggaggggaccggttccg

SEQ ID NO: 48489 - DNA, 21 bp, Artificial Sequence
  Synthetic: FXN 5 forward 9:69036228-69036255; SaCas9
tggtggaggggaccggttccg

SEQ ID NO: 48490 - DNA, 20 bp, Artificial Sequence
  Synthetic: FXN 5 forward 9:69036229-69036255; SaCas9
ggtggaggggaccggttccg

SEQ ID NO: 48491 - DNA, 19 bp, Artificial Sequence
  Synthetic: FXN 5 forward 9:69036230-69036255; SaCas9
gtggaggggaccggttccg

SEQ ID NO: 48492 - DNA, 18 bp, Artificial Sequence
  Synthetic: FXN 5 forward 9:69036231-69036255; SaCas9
tggaggggaccggttccg

SEQ ID NO: 48493 - DNA, 25 bp, Artificial Sequence
  Synthetic: FXN 5 reverse 9:69036243-69036274; SaCas9
agcatggagacagccgcacacccct

SEQ ID NO: 48494 - DNA, 24 bp, Artificial Sequence
  Synthetic: FXN 5 reverse 9:69036244-69036274; SaCas9
gcatggagacagccgcacacccct

SEQ ID NO: 48495 - DNA, 23 bp, Artificial Sequence
  Synthetic: FXN 5 reverse 9:69036245-69036274; SaCas9
catggagacagccgcacacccct

SEQ ID NO: 48496 - DNA, 22 bp, Artificial Sequence
  Synthetic: FXN 5 reverse 9:69036246-69036274; SaCas9
atggagacagccgcacacccct

SEQ ID NO: 48497 - DNA, 21 bp, Artificial Sequence
  Synthetic: FXN 5 reverse 9:69036247-69036274; SaCas9
tggagacagccgcacacccct

SEQ ID NO: 48498 - DNA, 20 bp, Artificial Sequence
  Synthetic: FXN 5 reverse 9:69036248-69036274; SaCas9
ggagacagccgcacacccct

SEQ ID NO: 48499 - DNA, 19 bp, Artificial Sequence
  Synthetic: FXN 5 reverse 9:69036249-69036274; SaCas9
gagacagccgcacacccct

SEQ ID NO: 48500 - DNA, 18 bp, Artificial Sequence
  Synthetic: FXN 5 reverse 9:69036250-69036274; SaCas9
agacagccgcacacccct

SEQ ID NO: 48501 - DNA, 25 bp, Artificial Sequence
  Synthetic: FXN 5 reverse 9:69036244-69036275; SaCas9
aagcatggagacagccgcacacccc

SEQ ID NO: 48502 - DNA, 24 bp, Artificial Sequence
  Synthetic: FXN 5 reverse 9:69036245-69036275; SaCas9
agcatggagacagccgcacacccc

SEQ ID NO: 48503 - DNA, 23 bp, Artificial Sequence
  Synthetic: FXN 5 reverse 9:69036246-69036275; SaCas9
gcatggagacagccgcacacccc

SEQ ID NO: 48504 - DNA, 22 bp, Artificial Sequence
  Synthetic: FXN 5 reverse 9:69036247-69036275; SaCas9
catggagacagccgcacacccc

SEQ ID NO: 48505 - DNA, 21 bp, Artificial Sequence
  Synthetic: FXN 5 reverse 9:69036248-69036275; SaCas9
atggagacagccgcacacccc

SEQ ID NO: 48506 - DNA, 20 bp, Artificial Sequence
  Synthetic: FXN 5 reverse 9:69036249-69036275; SaCas9
tggagacagccgcacacccc

SEQ ID NO: 48507 - DNA, 19 bp, Artificial Sequence
  Synthetic: FXN 5 reverse 9:69036250-69036275; SaCas9
ggagacagccgcacacccc

SEQ ID NO: 48508 - DNA, 18 bp, Artificial Sequence
  Synthetic: FXN 5 reverse 9:69036251-69036275; SaCas9
gagacagccgcacacccc

SEQ ID NO: 48509 - DNA, 25 bp, Artificial Sequence
  Synthetic: FXN 5 reverse 9:69036264-69036295; SaCas9
agttatcgcagagaagtgacaagca

SEQ ID NO: 48510 - DNA, 24 bp, Artificial Sequence
  Synthetic: FXN 5 reverse 9:69036265-69036295; SaCas9
gttatcgcagagaagtgacaagca

SEQ ID NO: 48511 - DNA, 23 bp, Artificial Sequence
  Synthetic: FXN 5 reverse 9:69036266-69036295; SaCas9
ttatcgcagagaagtgacaagca

SEQ ID NO: 48512 - DNA, 22 bp, Artificial Sequence
  Synthetic: FXN 5 reverse 9:69036267-69036295; SaCas9
tatcgcagagaagtgacaagca

SEQ ID NO: 48513 - DNA, 21 bp, Artificial Sequence
  Synthetic: FXN 5 reverse 9:69036268-69036295; SaCas9
atcgcagagaagtgacaagca

SEQ ID NO: 48514 - DNA, 20 bp, Artificial Sequence
  Synthetic: FXN 5 reverse 9:69036269-69036295; SaCas9
tcgcagagaagtgacaagca

SEQ ID NO: 48515 - DNA, 19 bp, Artificial Sequence
  Synthetic: FXN 5 reverse 9:69036270-69036295; SaCas9
cgcagagaagtgacaagca

SEQ ID NO: 48516 - DNA, 18 bp, Artificial Sequence
  Synthetic: FXN 5 reverse 9:69036271-69036295; SaCas9
gcagagaagtgacaagca

SEQ ID NO: 48517 - DNA, 25 bp, Artificial Sequence
  Synthetic: FXN 5 reverse 9:69036265-69036296; SaCas9
aagttatcgcagagaagtgacaagc

SEQ ID NO: 48518 - DNA, 24 bp, Artificial Sequence
  Synthetic: FXN 5 reverse 9:69036266-69036296; SaCas9
agttatcgcagagaagtgacaagc

SEQ ID NO: 48519 - DNA, 23 bp, Artificial Sequence
  Synthetic: FXN 5 reverse 9:69036267-69036296; SaCas9
gttatcgcagagaagtgacaagc

SEQ ID NO: 48520 - DNA, 22 bp, Artificial Sequence
  Synthetic: FXN 5 reverse 9:69036268-69036296; SaCas9
ttatcgcagagaagtgacaagc

SEQ ID NO: 48521 - DNA, 21 bp, Artificial Sequence
  Synthetic: FXN 5 reverse 9:69036269-69036296; SaCas9
tatcgcagagaagtgacaagc

SEQ ID NO: 48522 - DNA, 20 bp, Artificial Sequence
  Synthetic: FXN 5 reverse 9:69036270-69036296; SaCas9
atcgcagagaagtgacaagc

SEQ ID NO: 48523 - DNA, 19 bp, Artificial Sequence
  Synthetic: FXN 5 reverse 9:69036271-69036296; SaCas9
tcgcagagaagtgacaagc

SEQ ID NO: 48524 - DNA, 18 bp, Artificial Sequence
  Synthetic: FXN 5 reverse 9:69036272-69036296; SaCas9
cgcagagaagtgacaagc

SEQ ID NO: 48525 - DNA, 25 bp, Artificial Sequence
  Synthetic: FXN 5 reverse 9:69036279-69036310; SaCas9
aatattactgaaacaagttatcgca

SEQ ID NO: 48526 - DNA, 24 bp, Artificial Sequence
  Synthetic: FXN 5 reverse 9:69036280-69036310; SaCas9
atattactgaaacaagttatcgca

SEQ ID NO: 48527 - DNA, 23 bp, Artificial Sequence
  Synthetic: FXN 5 reverse 9:69036281-69036310; SaCas9
tattactgaaacaagttatcgca

SEQ ID NO: 48528 - DNA, 22 bp, Artificial Sequence
  Synthetic: FXN 5 reverse 9:69036282-69036310; SaCas9
attactgaaacaagttatcgca

SEQ ID NO: 48529 - DNA, 21 bp, Artificial Sequence
  Synthetic: FXN 5 reverse 9:69036283-69036310; SaCas9
ttactgaaacaagttatcgca

SEQ ID NO: 48530 - DNA, 20 bp, Artificial Sequence
  Synthetic: FXN 5 reverse 9:69036284-69036310; SaCas9
tactgaaacaagttatcgca

SEQ ID NO: 48531 - DNA, 19 bp, Artificial Sequence
  Synthetic: FXN 5 reverse 9:69036285-69036310; SaCas9
actgaaacaagttatcgca

SEQ ID NO: 48532 - DNA, 18 bp, Artificial Sequence
  Synthetic: FXN 5 reverse 9:69036286-69036310; SaCas9
ctgaaacaagttatcgca

SEQ ID NO: 48533 - DNA, 25 bp, Artificial Sequence
  Synthetic: FXN 5 reverse 9:69036281-69036312; SaCas9
ttaatattactgaaacaagttatcg

SEQ ID NO: 48534 - DNA, 24 bp, Artificial Sequence
  Synthetic: FXN 5 reverse 9:69036282-69036312; SaCas9
taatattactgaaacaagttatcg

SEQ ID NO: 48535 - DNA, 23 bp, Artificial Sequence
  Synthetic: FXN 5 reverse 9:69036283-69036312; SaCas9
aatattactgaaacaagttatcg

SEQ ID NO: 48536 - DNA, 22 bp, Artificial Sequence
  Synthetic: FXN 5 reverse 9:69036284-69036312; SaCas9
atattactgaaacaagttatcg

SEQ ID NO: 48537 - DNA, 21 bp, Artificial Sequence
  Synthetic: FXN 5 reverse 9:69036285-69036312; SaCas9
tattactgaaacaagttatcg

SEQ ID NO: 48538 - DNA, 20 bp, Artificial Sequence
  Synthetic: FXN 5 reverse 9:69036286-69036312; SaCas9
attactgaaacaagttatcg

SEQ ID NO: 48539 - DNA, 19 bp, Artificial Sequence
  Synthetic: FXN 5 reverse 9:69036287-69036312; SaCas9
ttactgaaacaagttatcg

SEQ ID NO: 48540 - DNA, 18 bp, Artificial Sequence
  Synthetic: FXN 5 reverse 9:69036288-69036312; SaCas9
tactgaaacaagttatcg

SEQ ID NO: 48541 - DNA, 25 bp, Artificial Sequence
  Synthetic: FXN 5 reverse 9:69036297-69036328; SaCas9
tagcagataccatctattaatatta

SEQ ID NO: 48542 - DNA, 24 bp, Artificial Sequence
  Synthetic: FXN 5 reverse 9:69036298-69036328; SaCas9
agcagataccatctattaatatta

SEQ ID NO: 48543 - DNA, 23 bp, Artificial Sequence
  Synthetic: FXN 5 reverse 9:69036299-69036328; SaCas9
gcagataccatctattaatatta

SEQ ID NO: 48544 - DNA, 22 bp, Artificial Sequence
  Synthetic: FXN 5 reverse 9:69036300-69036328; SaCas9
cagataccatctattaatatta

SEQ ID NO: 48545 - DNA, 21 bp, Artificial Sequence
  Synthetic: FXN 5 reverse 9:69036301-69036328; SaCas9
agataccatctattaatatta

SEQ ID NO: 48546 - DNA, 20 bp, Artificial Sequence
  Synthetic: FXN 5 reverse 9:69036302-69036328; SaCas9
gataccatctattaatatta

SEQ ID NO: 48547 - DNA, 19 bp, Artificial Sequence
  Synthetic: FXN 5 reverse 9:69036303-69036328; SaCas9
ataccatctattaatatta

SEQ ID NO: 48548 - DNA, 18 bp, Artificial Sequence
  Synthetic: FXN 5 reverse 9:69036304-69036328; SaCas9
taccatctattaatatta

SEQ ID NO: 48549 - DNA, 25 bp, Artificial Sequence
  Synthetic: FXN 5 forward 9:69036380-69036411; SaCas9
gtgttgtgtgtgtgtgtttgcgcgc

SEQ ID NO: 48550 - DNA, 24 bp, Artificial Sequence
  Synthetic: FXN 5 forward 9:69036381-69036411; SaCas9
tgttgtgtgtgtgtgtttgcgcgc

SEQ ID NO: 48551 - DNA, 23 bp, Artificial Sequence
  Synthetic: FXN 5 forward 9:69036382-69036411; SaCas9
gttgtgtgtgtgtgtttgcgcgc

SEQ ID NO: 48552 - DNA, 22 bp, Artificial Sequence
  Synthetic: FXN 5 forward 9:69036383-69036411; SaCas9
ttgtgtgtgtgtgtttgcgcgc

SEQ ID NO: 48553 - DNA, 21 bp, Artificial Sequence
  Synthetic: FXN 5 forward 9:69036384-69036411; SaCas9
tgtgtgtgtgtgtttgcgcgc

SEQ ID NO: 48554 - DNA, 20 bp, Artificial Sequence
  Synthetic: FXN 5 forward 9:69036385-69036411; SaCas9
gtgtgtgtgtgtttgcgcgc

SEQ ID NO: 48555 - DNA, 19 bp, Artificial Sequence
  Synthetic: FXN 5 forward 9:69036386-69036411; SaCas9
tgtgtgtgtgtttgcgcgc

SEQ ID NO: 48556 - DNA, 18 bp, Artificial Sequence
  Synthetic: FXN 5 forward 9:69036387-69036411; SaCas9
gtgtgtgtgtttgcgcgc

SEQ ID NO: 48557 - DNA, 25 bp, Artificial Sequence
  Synthetic: FXN 5 forward 9:69036411-69036442; SaCas9
gcgcgcacacctaatattttcaagg

SEQ ID NO: 48558 - DNA, 24 bp, Artificial Sequence
  Synthetic: FXN 5 forward 9:69036412-69036442; SaCas9
cgcgcacacctaatattttcaagg

SEQ ID NO: 48559 - DNA, 23 bp, Artificial Sequence
  Synthetic: FXN 5 forward 9:69036413-69036442; SaCas9
gcgcacacctaatattttcaagg

SEQ ID NO: 48560 - DNA, 22 bp, Artificial Sequence
  Synthetic: FXN 5 forward 9:69036414-69036442; SaCas9
cgcacacctaatattttcaagg

SEQ ID NO: 48561 - DNA, 21 bp, Artificial Sequence
  Synthetic: FXN 5 forward 9:69036415-69036442; SaCas9
gcacacctaatattttcaagg

SEQ ID NO: 48562 - DNA, 20 bp, Artificial Sequence
  Synthetic: FXN 5 forward 9:69036416-69036442; SaCas9
cacacctaatattttcaagg

SEQ ID NO: 48563 - DNA, 19 bp, Artificial Sequence
  Synthetic: FXN 5 forward 9:69036417-69036442; SaCas9
acacctaatattttcaagg

SEQ ID NO: 48564 - DNA, 18 bp, Artificial Sequence
  Synthetic: FXN 5 forward 9:69036418-69036442; SaCas9
cacctaatattttcaagg

SEQ ID NO: 48565 - DNA, 25 bp, Artificial Sequence
  Synthetic: FXN 5 forward 9:69036421-69036452; SaCas9
ctaatattttcaaggctggattttt

SEQ ID NO: 48566 - DNA, 24 bp, Artificial Sequence
  Synthetic: FXN 5 forward 9:69036422-69036452; SaCas9
taatattttcaaggctggattttt

SEQ ID NO: 48567 - DNA, 23 bp, Artificial Sequence
  Synthetic: FXN 5 forward 9:69036423-69036452; SaCas9
aatattttcaaggctggattttt

SEQ ID NO: 48568 - DNA, 22 bp, Artificial Sequence
  Synthetic: FXN 5 forward 9:69036424-69036452; SaCas9
atattttcaaggctggattttt

SEQ ID NO: 48569 - DNA, 21 bp, Artificial Sequence
  Synthetic: FXN 5 forward 9:69036425-69036452; SaCas9
tattttcaaggctggattttt

SEQ ID NO: 48570 - DNA, 20 bp, Artificial Sequence
  Synthetic: FXN 5 forward 9:69036426-69036452; SaCas9
attttcaaggctggattttt

SEQ ID NO: 48571 - DNA, 19 bp, Artificial Sequence
  Synthetic: FXN 5 forward 9:69036427-69036452; SaCas9
ttttcaaggctggattttt

SEQ ID NO: 48572 - DNA, 18 bp, Artificial Sequence
  Synthetic: FXN 5 forward 9:69036428-69036452; SaCas9
tttcaaggctggattttt

SEQ ID NO: 48573 - DNA, 25 bp, Artificial Sequence
  Synthetic: FXN 5 forward 9:69036425-69036456; SaCas9
tattttcaaggctggatttttttga

SEQ ID NO: 48574 - DNA, 24 bp, Artificial Sequence
  Synthetic: FXN 5 forward 9:69036426-69036456; SaCas9
attttcaaggctggatttttttga

SEQ ID NO: 48575 - DNA, 23 bp, Artificial Sequence
  Synthetic: FXN 5 forward 9:69036427-69036456; SaCas9
ttttcaaggctggatttttttga

SEQ ID NO: 48576 - DNA, 22 bp, Artificial Sequence
  Synthetic: FXN 5 forward 9:69036428-69036456; SaCas9
tttcaaggctggatttttttga

SEQ ID NO: 48577 - DNA, 21 bp, Artificial Sequence
  Synthetic: FXN 5 forward 9:69036429-69036456; SaCas9
ttcaaggctggatttttttga

SEQ ID NO: 48578 - DNA, 20 bp, Artificial Sequence
  Synthetic: FXN 5 forward 9:69036430-69036456; SaCas9
tcaaggctggatttttttga

SEQ ID NO: 48579 - DNA, 19 bp, Artificial Sequence
  Synthetic: FXN 5 forward 9:69036431-69036456; SaCas9
caaggctggatttttttga

SEQ ID NO: 48580 - DNA, 18 bp, Artificial Sequence
  Synthetic: FXN 5 forward 9:69036432-69036456; SaCas9
aaggctggatttttttga

SEQ ID NO: 48581 - DNA, 25 bp, Artificial Sequence
  Synthetic: FXN 5 reverse 9:69036428-69036459; SaCas9
gcatttcgttcaaaaaaatccagcc

SEQ ID NO: 48582 - DNA, 24 bp, Artificial Sequence
  Synthetic: FXN 5 reverse 9:69036429-69036459; SaCas9
catttcgttcaaaaaaatccagcc

SEQ ID NO: 48583 - DNA, 23 bp, Artificial Sequence
  Synthetic: FXN 5 reverse 9:69036430-69036459; SaCas9
atttcgttcaaaaaaatccagcc

SEQ ID NO: 48584 - DNA, 22 bp, Artificial Sequence
  Synthetic: FXN 5 reverse 9:69036431-69036459; SaCas9
tttcgttcaaaaaaatccagcc

SEQ ID NO: 48585 - DNA, 21 bp, Artificial Sequence
  Synthetic: FXN 5 reverse 9:69036432-69036459; SaCas9
ttcgttcaaaaaaatccagcc

SEQ ID NO: 48586 - DNA, 20 bp, Artificial Sequence
  Synthetic: FXN 5 reverse 9:69036433-69036459; SaCas9
tcgttcaaaaaaatccagcc

SEQ ID NO: 48587 - DNA, 19 bp, Artificial Sequence
  Synthetic: FXN 5 reverse 9:69036434-69036459; SaCas9
cgttcaaaaaaatccagcc

SEQ ID NO: 48588 - DNA, 18 bp, Artificial Sequence
  Synthetic: FXN 5 reverse 9:69036435-69036459; SaCas9
gttcaaaaaaatccagcc

SEQ ID NO: 48589 - DNA, 25 bp, Artificial Sequence
  Synthetic: FXN 5 forward 9:69036438-69036469; SaCas9
ggatttttttgaacgaaatgctttc

SEQ ID NO: 48590 - DNA, 24 bp, Artificial Sequence
  Synthetic: FXN 5 forward 9:69036439-69036469; SaCas9
gatttttttgaacgaaatgctttc

SEQ ID NO: 48591 - DNA, 23 bp, Artificial Sequence
  Synthetic: FXN 5 forward 9:69036440-69036469; SaCas9
atttttttgaacgaaatgctttc

SEQ ID NO: 48592 - DNA, 22 bp, Artificial Sequence
  Synthetic: FXN 5 forward 9:69036441-69036469; SaCas9
tttttttgaacgaaatgctttc

SEQ ID NO: 48593 - DNA, 21 bp, Artificial Sequence
  Synthetic: FXN 5 forward 9:69036442-69036469; SaCas9
ttttttgaacgaaatgctttc

SEQ ID NO: 48594 - DNA, 20 bp, Artificial Sequence
  Synthetic: FXN 5 forward 9:69036443-69036469; SaCas9
tttttgaacgaaatgctttc

SEQ ID NO: 48595 - DNA, 19 bp, Artificial Sequence
  Synthetic: FXN 5 forward 9:69036444-69036469; SaCas9
ttttgaacgaaatgctttc

SEQ ID NO: 48596 - DNA, 18 bp, Artificial Sequence
  Synthetic: FXN 5 forward 9:69036445-69036469; SaCas9
tttgaacgaaatgctttc

SEQ ID NO: 48597 - DNA, 25 bp, Artificial Sequence
  Synthetic: FXN 5 forward 9:69036439-69036470; SaCas9
gatttttttgaacgaaatgctttcc

SEQ ID NO: 48598 - DNA, 24 bp, Artificial Sequence
  Synthetic: FXN 5 forward 9:69036440-69036470; SaCas9
atttttttgaacgaaatgctttcc

SEQ ID NO: 48599 - DNA, 23 bp, Artificial Sequence
  Synthetic: FXN 5 forward 9:69036441-69036470; SaCas9
tttttttgaacgaaatgctttcc

SEQ ID NO: 48600 - DNA, 22 bp, Artificial Sequence
  Synthetic: FXN 5 forward 9:69036442-69036470; SaCas9
ttttttgaacgaaatgctttcc

SEQ ID NO: 48601 - DNA, 21 bp, Artificial Sequence
  Synthetic: FXN 5 forward 9:69036443-69036470; SaCas9
tttttgaacgaaatgctttcc

SEQ ID NO: 48602 - DNA, 20 bp, Artificial Sequence
  Synthetic: FXN 5 forward 9:69036444-69036470; SaCas9
ttttgaacgaaatgctttcc

SEQ ID NO: 48603 - DNA, 19 bp, Artificial Sequence
  Synthetic: FXN 5 forward 9:69036445-69036470; SaCas9
tttgaacgaaatgctttcc

SEQ ID NO: 48604 - DNA, 18 bp, Artificial Sequence
  Synthetic: FXN 5 forward 9:69036446-69036470; SaCas9
ttgaacgaaatgctttcc

SEQ ID NO: 48605 - DNA, 25 bp, Artificial Sequence
  Synthetic: FXN 5 forward 9:69036443-69036474; SaCas9
tttttgaacgaaatgctttcctgga

SEQ ID NO: 48606 - DNA, 24 bp, Artificial Sequence
  Synthetic: FXN 5 forward 9:69036444-69036474; SaCas9
ttttgaacgaaatgctttcctgga

SEQ ID NO: 48607 - DNA, 23 bp, Artificial Sequence
  Synthetic: FXN 5 forward 9:69036445-69036474; SaCas9
tttgaacgaaatgctttcctgga

SEQ ID NO: 48608 - DNA, 22 bp, Artificial Sequence
  Synthetic: FXN 5 forward 9:69036446-69036474; SaCas9
ttgaacgaaatgctttcctgga

SEQ ID NO: 48609 - DNA, 21 bp, Artificial Sequence
  Synthetic: FXN 5 forward 9:69036447-69036474; SaCas9
tgaacgaaatgctttcctgga

SEQ ID NO: 48610 - DNA, 20 bp, Artificial Sequence
  Synthetic: FXN 5 forward 9:69036448-69036474; SaCas9
gaacgaaatgctttcctgga

SEQ ID NO: 48611 - DNA, 19 bp, Artificial Sequence
  Synthetic: FXN 5 forward 9:69036449-69036474; SaCas9
aacgaaatgctttcctgga

SEQ ID NO: 48612 - DNA, 18 bp, Artificial Sequence
  Synthetic: FXN 5 forward 9:69036450-69036474; SaCas9
acgaaatgctttcctgga

SEQ ID NO: 48613 - DNA, 25 bp, Artificial Sequence
  Synthetic: FXN 5 forward 9:69036448-69036479; SaCas9
gaacgaaatgctttcctggaacgag

SEQ ID NO: 48614 - DNA, 24 bp, Artificial Sequence
  Synthetic: FXN 5 forward 9:69036449-69036479; SaCas9
aacgaaatgctttcctggaacgag

SEQ ID NO: 48615 - DNA, 23 bp, Artificial Sequence
  Synthetic: FXN 5 forward 9:69036450-69036479; SaCas9
acgaaatgctttcctggaacgag

SEQ ID NO: 48616 - DNA, 22 bp, Artificial Sequence
  Synthetic: FXN 5 forward 9:69036451-69036479; SaCas9
cgaaatgctttcctggaacgag

SEQ ID NO: 48617 - DNA, 21 bp, Artificial Sequence
  Synthetic: FXN 5 forward 9:69036452-69036479; SaCas9
gaaatgctttcctggaacgag

SEQ ID NO: 48618 - DNA, 20 bp, Artificial Sequence
  Synthetic: FXN 5 forward 9:69036453-69036479; SaCas9
aaatgctttcctggaacgag

SEQ ID NO: 48619 - DNA, 19 bp, Artificial Sequence
  Synthetic: FXN 5 forward 9:69036454-69036479; SaCas9
aatgctttcctggaacgag

SEQ ID NO: 48620 - DNA, 18 bp, Artificial Sequence
  Synthetic: FXN 5 forward 9:69036455-69036479; SaCas9
atgctttcctggaacgag

SEQ ID NO: 48621 - DNA, 25 bp, Artificial Sequence
  Synthetic: FXN 5 forward 9:69036458-69036489; SaCas9
ctttcctggaacgaggtgaaacttt

SEQ ID NO: 48622 - DNA, 24 bp, Artificial Sequence
  Synthetic: FXN 5 forward 9:69036459-69036489; SaCas9
tttcctggaacgaggtgaaacttt

SEQ ID NO: 48623 - DNA, 23 bp, Artificial Sequence
  Synthetic: FXN 5 forward 9:69036460-69036489; SaCas9
ttcctggaacgaggtgaaacttt

SEQ ID NO: 48624 - DNA, 22 bp, Artificial Sequence
  Synthetic: FXN 5 forward 9:69036461-69036489; SaCas9
tcctggaacgaggtgaaacttt

SEQ ID NO: 48625 - DNA, 21 bp, Artificial Sequence
  Synthetic: FXN 5 forward 9:69036462-69036489; SaCas9
cctggaacgaggtgaaacttt

SEQ ID NO: 48626 - DNA, 20 bp, Artificial Sequence
  Synthetic: FXN 5 forward 9:69036463-69036489; SaCas9
ctggaacgaggtgaaacttt

SEQ ID NO: 48627 - DNA, 19 bp, Artificial Sequence
  Synthetic: FXN 5 forward 9:69036464-69036489; SaCas9
tggaacgaggtgaaacttt

SEQ ID NO: 48628 - DNA, 18 bp, Artificial Sequence
  Synthetic: FXN 5 forward 9:69036465-69036489; SaCas9
ggaacgaggtgaaacttt

SEQ ID NO: 48629 - DNA, 25 bp, Artificial Sequence
  Synthetic: FXN 5 reverse 9:69036459-69036490; SaCas9
agctctgaaagtttcacctcgttcc

SEQ ID NO: 48630 - DNA, 24 bp, Artificial Sequence
  Synthetic: FXN 5 reverse 9:69036460-69036490; SaCas9
gctctgaaagtttcacctcgttcc

SEQ ID NO: 48631 - DNA, 23 bp, Artificial Sequence
  Synthetic: FXN 5 reverse 9:69036461-69036490; SaCas9
ctctgaaagtttcacctcgttcc

SEQ ID NO: 48632 - DNA, 22 bp, Artificial Sequence
  Synthetic: FXN 5 reverse 9:69036462-69036490; SaCas9
tctgaaagtttcacctcgttcc

SEQ ID NO: 48633 - DNA, 21 bp, Artificial Sequence
  Synthetic: FXN 5 reverse 9:69036463-69036490; SaCas9
ctgaaagtttcacctcgttcc

SEQ ID NO: 48634 - DNA, 20 bp, Artificial Sequence
  Synthetic: FXN 5 reverse 9:69036464-69036490; SaCas9
tgaaagtttcacctcgttcc

SEQ ID NO: 48635 - DNA, 19 bp, Artificial Sequence
  Synthetic: FXN 5 reverse 9:69036465-69036490; SaCas9
gaaagtttcacctcgttcc

SEQ ID NO: 48636 - DNA, 18 bp, Artificial Sequence
  Synthetic: FXN 5 reverse 9:69036466-69036490; SaCas9
aaagtttcacctcgttcc

SEQ ID NO: 48637 - DNA, 25 bp, Artificial Sequence
  Synthetic: FXN 5 reverse 9:69036460-69036491; SaCas9
cagctctgaaagtttcacctcgttc

SEQ ID NO: 48638 - DNA, 24 bp, Artificial Sequence
  Synthetic: FXN 5 reverse 9:69036461-69036491; SaCas9
agctctgaaagtttcacctcgttc

SEQ ID NO: 48639 - DNA, 23 bp, Artificial Sequence
  Synthetic: FXN 5 reverse 9:69036462-69036491; SaCas9
gctctgaaagtttcacctcgttc

SEQ ID NO: 48640 - DNA, 22 bp, Artificial Sequence
  Synthetic: FXN 5 reverse 9:69036463-69036491; SaCas9
ctctgaaagtttcacctcgttc

SEQ ID NO: 48641 - DNA, 21 bp, Artificial Sequence
  Synthetic: FXN 5 reverse 9:69036464-69036491; SaCas9
tctgaaagtttcacctcgttc

SEQ ID NO: 48642 - DNA, 20 bp, Artificial Sequence
  Synthetic: FXN 5 reverse 9:69036465-69036491; SaCas9
ctgaaagtttcacctcgttc

SEQ ID NO: 48643 - DNA, 19 bp, Artificial Sequence
  Synthetic: FXN 5 reverse 9:69036466-69036491; SaCas9
tgaaagtttcacctcgttc

SEQ ID NO: 48644 - DNA, 18 bp, Artificial Sequence
  Synthetic: FXN 5 reverse 9:69036467-69036491; SaCas9
gaaagtttcacctcgttc

SEQ ID NO: 48645 - DNA, 25 bp, Artificial Sequence
  Synthetic: FXN 5 forward 9:69036466-69036497; SaCas9
gaacgaggtgaaactttcagagctg

SEQ ID NO: 48646 - DNA, 24 bp, Artificial Sequence
  Synthetic: FXN 5 forward 9:69036467-69036497; SaCas9
aacgaggtgaaactttcagagctg

SEQ ID NO: 48647 - DNA, 23 bp, Artificial Sequence
  Synthetic: FXN 5 forward 9:69036468-69036497; SaCas9
acgaggtgaaactttcagagctg

SEQ ID NO: 48648 - DNA, 22 bp, Artificial Sequence
  Synthetic: FXN 5 forward 9:69036469-69036497; SaCas9
cgaggtgaaactttcagagctg

SEQ ID NO: 48649 - DNA, 21 bp, Artificial Sequence
  Synthetic: FXN 5 forward 9:69036470-69036497; SaCas9
gaggtgaaactttcagagctg

SEQ ID NO: 48650 - DNA, 20 bp, Artificial Sequence
  Synthetic: FXN 5 forward 9:69036471-69036497; SaCas9
aggtgaaactttcagagctg

SEQ ID NO: 48651 - DNA, 19 bp, Artificial Sequence
  Synthetic: FXN 5 forward 9:69036472-69036497; SaCas9
ggtgaaactttcagagctg

SEQ ID NO: 48652 - DNA, 18 bp, Artificial Sequence
  Synthetic: FXN 5 forward 9:69036473-69036497; SaCas9
gtgaaactttcagagctg

SEQ ID NO: 48653 - DNA, 25 bp, Artificial Sequence
  Synthetic: FXN 5 forward 9:69036475-69036506; SaCas9
gaaactttcagagctgcagaatagc

SEQ ID NO: 48654 - DNA, 24 bp, Artificial Sequence
  Synthetic: FXN 5 forward 9:69036476-69036506; SaCas9
aaactttcagagctgcagaatagc

SEQ ID NO: 48655 - DNA, 23 bp, Artificial Sequence
  Synthetic: FXN 5 forward 9:69036477-69036506; SaCas9
aactttcagagctgcagaatagc

SEQ ID NO: 48656 - DNA, 22 bp, Artificial Sequence
  Synthetic: FXN 5 forward 9:69036478-69036506; SaCas9
actttcagagctgcagaatagc

SEQ ID NO: 48657 - DNA, 21 bp, Artificial Sequence
  Synthetic: FXN 5 forward 9:69036479-69036506; SaCas9
ctttcagagctgcagaatagc

SEQ ID NO: 48658 - DNA, 20 bp, Artificial Sequence
  Synthetic: FXN 5 forward 9:69036480-69036506; SaCas9
tttcagagctgcagaatagc

SEQ ID NO: 48659 - DNA, 19 bp, Artificial Sequence
  Synthetic: FXN 5 forward 9:69036481-69036506; SaCas9
ttcagagctgcagaatagc

SEQ ID NO: 48660 - DNA, 18 bp, Artificial Sequence
  Synthetic: FXN 5 forward 9:69036482-69036506; SaCas9
tcagagctgcagaatagc

SEQ ID NO: 48661 - DNA, 25 bp, Artificial Sequence
  Synthetic: FXN 5 reverse 9:69036480-69036511; SaCas9
ctgctgctctagctattctgcagct

SEQ ID NO: 48662 - DNA, 24 bp, Artificial Sequence
  Synthetic: FXN 5 reverse 9:69036481-69036511; SaCas9
tgctgctctagctattctgcagct

SEQ ID NO: 48663 - DNA, 23 bp, Artificial Sequence
  Synthetic: FXN 5 reverse 9:69036482-69036511; SaCas9
gctgctctagctattctgcagct

SEQ ID NO: 48664 - DNA, 22 bp, Artificial Sequence
  Synthetic: FXN 5 reverse 9:69036483-69036511; SaCas9
ctgctctagctattctgcagct

SEQ ID NO: 48665 - DNA, 21 bp, Artificial Sequence
  Synthetic: FXN 5 reverse 9:69036484-69036511; SaCas9
tgctctagctattctgcagct

SEQ ID NO: 48666 - DNA, 20 bp, Artificial Sequence
  Synthetic: FXN 5 reverse 9:69036485-69036511; SaCas9
gctctagctattctgcagct

SEQ ID NO: 48667 - DNA, 19 bp, Artificial Sequence
  Synthetic: FXN 5 reverse 9:69036486-69036511; SaCas9
ctctagctattctgcagct

SEQ ID NO: 48668 - DNA, 18 bp, Artificial Sequence
  Synthetic: FXN 5 reverse 9:69036487-69036511; SaCas9
tctagctattctgcagct

SEQ ID NO: 48669 - DNA, 25 bp, Artificial Sequence
  Synthetic: FXN 5 forward 9:69036483-69036514; SaCas9
cagagctgcagaatagctagagcag

SEQ ID NO: 48670 - DNA, 24 bp, Artificial Sequence
  Synthetic: FXN 5 forward 9:69036484-69036514; SaCas9
agagctgcagaatagctagagcag

SEQ ID NO: 48671 - DNA, 23 bp, Artificial Sequence
  Synthetic: FXN 5 forward 9:69036485-69036514; SaCas9
gagctgcagaatagctagagcag

SEQ ID NO: 48672 - DNA, 22 bp, Artificial Sequence
  Synthetic: FXN 5 forward 9:69036486-69036514; SaCas9
agctgcagaatagctagagcag

SEQ ID NO: 48673 - DNA, 21 bp, Artificial Sequence
  Synthetic: FXN 5 forward 9:69036487-69036514; SaCas9
gctgcagaatagctagagcag

SEQ ID NO: 48674 - DNA, 20 bp, Artificial Sequence
  Synthetic: FXN 5 forward 9:69036488-69036514; SaCas9
ctgcagaatagctagagcag

SEQ ID NO: 48675 - DNA, 19 bp, Artificial Sequence
  Synthetic: FXN 5 forward 9:69036489-69036514; SaCas9
tgcagaatagctagagcag

SEQ ID NO: 48676 - DNA, 18 bp, Artificial Sequence
  Synthetic: FXN 5 forward 9:69036490-69036514; SaCas9
gcagaatagctagagcag

SEQ ID NO: 48677 - DNA, 25 bp, Artificial Sequence
  Synthetic: FXN 5 forward 9:69036484-69036515; SaCas9
agagctgcagaatagctagagcagc

SEQ ID NO: 48678 - DNA, 24 bp, Artificial Sequence
  Synthetic: FXN 5 forward 9:69036485-69036515; SaCas9
gagctgcagaatagctagagcagc

SEQ ID NO: 48679 - DNA, 23 bp, Artificial Sequence
  Synthetic: FXN 5 forward 9:69036486-69036515; SaCas9
agctgcagaatagctagagcagc

SEQ ID NO: 48680 - DNA, 22 bp, Artificial Sequence
  Synthetic: FXN 5 forward 9:69036487-69036515; SaCas9
gctgcagaatagctagagcagc

SEQ ID NO: 48681 - DNA, 21 bp, Artificial Sequence
  Synthetic: FXN 5 forward 9:69036488-69036515; SaCas9
ctgcagaatagctagagcagc

SEQ ID NO: 48682 - DNA, 20 bp, Artificial Sequence
  Synthetic: FXN 5 forward 9:69036489-69036515; SaCas9
tgcagaatagctagagcagc

SEQ ID NO: 48683 - DNA, 19 bp, Artificial Sequence
  Synthetic: FXN 5 forward 9:69036490-69036515; SaCas9
gcagaatagctagagcagc

SEQ ID NO: 48684 - DNA, 18 bp, Artificial Sequence
  Synthetic: FXN 5 forward 9:69036491-69036515; SaCas9
cagaatagctagagcagc

SEQ ID NO: 48685 - DNA, 25 bp, Artificial Sequence
  Synthetic: FXN 5 forward 9:69036498-69036529; SaCas9
gctagagcagcaggggccctggctt

SEQ ID NO: 48686 - DNA, 24 bp, Artificial Sequence
  Synthetic: FXN 5 forward 9:69036499-69036529; SaCas9
ctagagcagcaggggccctggctt

SEQ ID NO: 48687 - DNA, 23 bp, Artificial Sequence
  Synthetic: FXN 5 forward 9:69036500-69036529; SaCas9
tagagcagcaggggccctggctt

SEQ ID NO: 48688 - DNA, 22 bp, Artificial Sequence
  Synthetic: FXN 5 forward 9:69036501-69036529; SaCas9
agagcagcaggggccctggctt

SEQ ID NO: 48689 - DNA, 21 bp, Artificial Sequence
  Synthetic: FXN 5 forward 9:69036502-69036529; SaCas9
gagcagcaggggccctggctt

SEQ ID NO: 48690 - DNA, 20 bp, Artificial Sequence
  Synthetic: FXN 5 forward 9:69036503-69036529; SaCas9
agcagcaggggccctggctt

SEQ ID NO: 48691 - DNA, 19 bp, Artificial Sequence
  Synthetic: FXN 5 forward 9:69036504-69036529; SaCas9
gcagcaggggccctggctt

SEQ ID NO: 48692 - DNA, 18 bp, Artificial Sequence
  Synthetic: FXN 5 forward 9:69036505-69036529; SaCas9
cagcaggggccctggctt

SEQ ID NO: 48693 - DNA, 25 bp, Artificial Sequence
  Synthetic: FXN 5 forward 9:69036499-69036530; SaCas9
ctagagcagcaggggccctggcttt

SEQ ID NO: 48694 - DNA, 24 bp, Artificial Sequence
  Synthetic: FXN 5 forward 9:69036500-69036530; SaCas9
tagagcagcaggggccctggcttt

SEQ ID NO: 48695 - DNA, 23 bp, Artificial Sequence
  Synthetic: FXN 5 forward 9:69036501-69036530; SaCas9
agagcagcaggggccctggcttt

SEQ ID NO: 48696 - DNA, 22 bp, Artificial Sequence
  Synthetic: FXN 5 forward 9:69036502-69036530; SaCas9
gagcagcaggggccctggcttt

SEQ ID NO: 48697 - DNA, 21 bp, Artificial Sequence
  Synthetic: FXN 5 forward 9:69036503-69036530; SaCas9
agcagcaggggccctggcttt

SEQ ID NO: 48698 - DNA, 20 bp, Artificial Sequence
  Synthetic: FXN 5 forward 9:69036504-69036530; SaCas9
gcagcaggggccctggcttt

SEQ ID NO: 48699 - DNA, 19 bp, Artificial Sequence
  Synthetic: FXN 5 forward 9:69036505-69036530; SaCas9
cagcaggggccctggcttt

SEQ ID NO: 48700 - DNA, 18 bp, Artificial Sequence
  Synthetic: FXN 5 forward 9:69036506-69036530; SaCas9
agcaggggccctggcttt

SEQ ID NO: 48701 - DNA, 25 bp, Artificial Sequence
  Synthetic: FXN 5 reverse 9:69036513-69036544; SaCas9
aaaggtcgggtcagtttccaaaagc

SEQ ID NO: 48702 - DNA, 24 bp, Artificial Sequence
  Synthetic: FXN 5 reverse 9:69036514-69036544; SaCas9
aaggtcgggtcagtttccaaaagc

SEQ ID NO: 48703 - DNA, 23 bp, Artificial Sequence
  Synthetic: FXN 5 reverse 9:69036515-69036544; SaCas9
aggtcgggtcagtttccaaaagc

SEQ ID NO: 48704 - DNA, 22 bp, Artificial Sequence
  Synthetic: FXN 5 reverse 9:69036516-69036544; SaCas9
ggtcgggtcagtttccaaaagc

SEQ ID NO: 48705 - DNA, 21 bp, Artificial Sequence
  Synthetic: FXN 5 reverse 9:69036517-69036544; SaCas9
gtcgggtcagtttccaaaagc

SEQ ID NO: 48706 - DNA, 20 bp, Artificial Sequence
  Synthetic: FXN 5 reverse 9:69036518-69036544; SaCas9
tcgggtcagtttccaaaagc

SEQ ID NO: 48707 - DNA, 19 bp, Artificial Sequence
  Synthetic: FXN 5 reverse 9:69036519-69036544; SaCas9
cgggtcagtttccaaaagc

SEQ ID NO: 48708 - DNA, 18 bp, Artificial Sequence
  Synthetic: FXN 5 reverse 9:69036520-69036544; SaCas9
gggtcagtttccaaaagc

SEQ ID NO: 48709 - DNA, 25 bp, Artificial Sequence
  Synthetic: FXN 5 reverse 9:69036533-69036564; SaCas9
agtggggcagaatctggaataaagg

SEQ ID NO: 48710 - DNA, 24 bp, Artificial Sequence
  Synthetic: FXN 5 reverse 9:69036534-69036564; SaCas9
gtggggcagaatctggaataaagg

SEQ ID NO: 48711 - DNA, 23 bp, Artificial Sequence
  Synthetic: FXN 5 reverse 9:69036535-69036564; SaCas9
tggggcagaatctggaataaagg

SEQ ID NO: 48712 - DNA, 22 bp, Artificial Sequence
  Synthetic: FXN 5 reverse 9:69036536-69036564; SaCas9
ggggcagaatctggaataaagg

SEQ ID NO: 48713 - DNA, 21 bp, Artificial Sequence
  Synthetic: FXN 5 reverse 9:69036537-69036564; SaCas9
gggcagaatctggaataaagg

SEQ ID NO: 48714 - DNA, 20 bp, Artificial Sequence
  Synthetic: FXN 5 reverse 9:69036538-69036564; SaCas9
ggcagaatctggaataaagg

SEQ ID NO: 48715 - DNA, 19 bp, Artificial Sequence
  Synthetic: FXN 5 reverse 9:69036539-69036564; SaCas9
gcagaatctggaataaagg

SEQ ID NO: 48716 - DNA, 18 bp, Artificial Sequence
  Synthetic: FXN 5 reverse 9:69036540-69036564; SaCas9
cagaatctggaataaagg

SEQ ID NO: 48717 - DNA, 25 bp, Artificial Sequence
  Synthetic: FXN 5 forward 9:69036542-69036573; SaCas9
ttattccagattctgccccactccg

SEQ ID NO: 48718 - DNA, 24 bp, Artificial Sequence
  Synthetic: FXN 5 forward 9:69036543-69036573; SaCas9
tattccagattctgccccactccg

SEQ ID NO: 48719 - DNA, 23 bp, Artificial Sequence
  Synthetic: FXN 5 forward 9:69036544-69036573; SaCas9
attccagattctgccccactccg

SEQ ID NO: 48720 - DNA, 22 bp, Artificial Sequence
  Synthetic: FXN 5 forward 9:69036545-69036573; SaCas9
ttccagattctgccccactccg

SEQ ID NO: 48721 - DNA, 21 bp, Artificial Sequence
  Synthetic: FXN 5 forward 9:69036546-69036573; SaCas9
tccagattctgccccactccg

SEQ ID NO: 48722 - DNA, 20 bp, Artificial Sequence
  Synthetic: FXN 5 forward 9:69036547-69036573; SaCas9
ccagattctgccccactccg

SEQ ID NO: 48723 - DNA, 19 bp, Artificial Sequence
  Synthetic: FXN 5 forward 9:69036548-69036573; SaCas9
cagattctgccccactccg

SEQ ID NO: 48724 - DNA, 18 bp, Artificial Sequence
  Synthetic: FXN 5 forward 9:69036549-69036573; SaCas9
agattctgccccactccg

SEQ ID NO: 48725 - DNA, 25 bp, Artificial Sequence
  Synthetic: FXN 5 reverse 9:69036544-69036575; SaCas9
cagctctgcggagtggggcagaatc

SEQ ID NO: 48726 - DNA, 24 bp, Artificial Sequence
  Synthetic: FXN 5 reverse 9:69036545-69036575; SaCas9
agctctgcggagtggggcagaatc

SEQ ID NO: 48727 - DNA, 23 bp, Artificial Sequence
  Synthetic: FXN 5 reverse 9:69036546-69036575; SaCas9
gctctgcggagtggggcagaatc

SEQ ID NO: 48728 - DNA, 22 bp, Artificial Sequence
  Synthetic: FXN 5 reverse 9:69036547-69036575; SaCas9
ctctgcggagtggggcagaatc

SEQ ID NO: 48729 - DNA, 21 bp, Artificial Sequence
  Synthetic: FXN 5 reverse 9:69036548-69036575; SaCas9
tctgcggagtggggcagaatc

SEQ ID NO: 48730 - DNA, 20 bp, Artificial Sequence
  Synthetic: FXN 5 reverse 9:69036549-69036575; SaCas9
ctgcggagtggggcagaatc

SEQ ID NO: 48731 - DNA, 19 bp, Artificial Sequence
  Synthetic: FXN 5 reverse 9:69036550-69036575; SaCas9
tgcggagtggggcagaatc

SEQ ID NO: 48732 - DNA, 18 bp, Artificial Sequence
  Synthetic: FXN 5 reverse 9:69036551-69036575; SaCas9
gcggagtggggcagaatc

SEQ ID NO: 48733 - DNA, 25 bp, Artificial Sequence
  Synthetic: FXN 5 reverse 9:69036545-69036576; SaCas9
acagctctgcggagtggggcagaat

SEQ ID NO: 48734 - DNA, 24 bp, Artificial Sequence
  Synthetic: FXN 5 reverse 9:69036546-69036576; SaCas9
cagctctgcggagtggggcagaat

SEQ ID NO: 48735 - DNA, 23 bp, Artificial Sequence
  Synthetic: FXN 5 reverse 9:69036547-69036576; SaCas9
agctctgcggagtggggcagaat

SEQ ID NO: 48736 - DNA, 22 bp, Artificial Sequence
  Synthetic: FXN 5 reverse 9:69036548-69036576; SaCas9
gctctgcggagtggggcagaat

SEQ ID NO: 48737 - DNA, 21 bp, Artificial Sequence
  Synthetic: FXN 5 reverse 9:69036549-69036576; SaCas9
ctctgcggagtggggcagaat

SEQ ID NO: 48738 - DNA, 20 bp, Artificial Sequence
  Synthetic: FXN 5 reverse 9:69036550-69036576; SaCas9
tctgcggagtggggcagaat

SEQ ID NO: 48739 - DNA, 19 bp, Artificial Sequence
  Synthetic: FXN 5 reverse 9:69036551-69036576; SaCas9
ctgcggagtggggcagaat

SEQ ID NO: 48740 - DNA, 18 bp, Artificial Sequence
  Synthetic: FXN 5 reverse 9:69036552-69036576; SaCas9
tgcggagtggggcagaat

SEQ ID NO: 48741 - DNA, 25 bp, Artificial Sequence
  Synthetic: FXN 5 reverse 9:69036551-69036582; SaCas9
ggtcacacagctctgcggagtgggg

SEQ ID NO: 48742 - DNA, 24 bp, Artificial Sequence
  Synthetic: FXN 5 reverse 9:69036552-69036582; SaCas9
gtcacacagctctgcggagtgggg

SEQ ID NO: 48743 - DNA, 23 bp, Artificial Sequence
  Synthetic: FXN 5 reverse 9:69036553-69036582; SaCas9
tcacacagctctgcggagtgggg

SEQ ID NO: 48744 - DNA, 22 bp, Artificial Sequence
  Synthetic: FXN 5 reverse 9:69036554-69036582; SaCas9
cacacagctctgcggagtgggg

SEQ ID NO: 48745 - DNA, 21 bp, Artificial Sequence
  Synthetic: FXN 5 reverse 9:69036555-69036582; SaCas9
acacagctctgcggagtgggg

SEQ ID NO: 48746 - DNA, 20 bp, Artificial Sequence
  Synthetic: FXN 5 reverse 9:69036556-69036582; SaCas9
cacagctctgcggagtgggg

SEQ ID NO: 48747 - DNA, 19 bp, Artificial Sequence
  Synthetic: FXN 5 reverse 9:69036557-69036582; SaCas9
acagctctgcggagtgggg

SEQ ID NO: 48748 - DNA, 18 bp, Artificial Sequence
  Synthetic: FXN 5 reverse 9:69036558-69036582; SaCas9
cagctctgcggagtgggg

SEQ ID NO: 48749 - DNA, 25 bp, Artificial Sequence
  Synthetic: FXN 5 reverse 9:69036556-69036587; SaCas9
cccaaggtcacacagctctgcggag

SEQ ID NO: 48750 - DNA, 24 bp, Artificial Sequence
  Synthetic: FXN 5 reverse 9:69036557-69036587; SaCas9
ccaaggtcacacagctctgcggag

SEQ ID NO: 48751 - DNA, 23 bp, Artificial Sequence
  Synthetic: FXN 5 reverse 9:69036558-69036587; SaCas9
caaggtcacacagctctgcggag

SEQ ID NO: 48752 - DNA, 22 bp, Artificial Sequence
  Synthetic: FXN 5 reverse 9:69036559-69036587; SaCas9
aaggtcacacagctctgcggag

SEQ ID NO: 48753 - DNA, 21 bp, Artificial Sequence
  Synthetic: FXN 5 reverse 9:69036560-69036587; SaCas9
aggtcacacagctctgcggag

SEQ ID NO: 48754 - DNA, 20 bp, Artificial Sequence
  Synthetic: FXN 5 reverse 9:69036561-69036587; SaCas9
ggtcacacagctctgcggag

SEQ ID NO: 48755 - DNA, 19 bp, Artificial Sequence
  Synthetic: FXN 5 reverse 9:69036562-69036587; SaCas9
gtcacacagctctgcggag

SEQ ID NO: 48756 - DNA, 18 bp, Artificial Sequence
  Synthetic: FXN 5 reverse 9:69036563-69036587; SaCas9
tcacacagctctgcggag

SEQ ID NO: 48757 - DNA, 25 bp, Artificial Sequence
  Synthetic: FXN 5 forward 9:69036557-69036588; SaCas9
ccccactccgcagagctgtgtgacc

SEQ ID NO: 48758 - DNA, 24 bp, Artificial Sequence
  Synthetic: FXN 5 forward 9:69036558-69036588; SaCas9
cccactccgcagagctgtgtgacc

SEQ ID NO: 48759 - DNA, 23 bp, Artificial Sequence
  Synthetic: FXN 5 forward 9:69036559-69036588; SaCas9
ccactccgcagagctgtgtgacc

SEQ ID NO: 48760 - DNA, 22 bp, Artificial Sequence
  Synthetic: FXN 5 forward 9:69036560-69036588; SaCas9
cactccgcagagctgtgtgacc

SEQ ID NO: 48761 - DNA, 21 bp, Artificial Sequence
  Synthetic: FXN 5 forward 9:69036561-69036588; SaCas9
actccgcagagctgtgtgacc

SEQ ID NO: 48762 - DNA, 20 bp, Artificial Sequence
  Synthetic: FXN 5 forward 9:69036562-69036588; SaCas9
ctccgcagagctgtgtgacc

SEQ ID NO: 48763 - DNA, 19 bp, Artificial Sequence
  Synthetic: FXN 5 forward 9:69036563-69036588; SaCas9
tccgcagagctgtgtgacc

SEQ ID NO: 48764 - DNA, 18 bp, Artificial Sequence
  Synthetic: FXN 5 forward 9:69036564-69036588; SaCas9
ccgcagagctgtgtgacc

SEQ ID NO: 48765 - DNA, 25 bp, Artificial Sequence
  Synthetic: FXN 5 reverse 9:69036557-69036588; SaCas9
ccccaaggtcacacagctctgcgga

SEQ ID NO: 48766 - DNA, 24 bp, Artificial Sequence
  Synthetic: FXN 5 reverse 9:69036558-69036588; SaCas9
cccaaggtcacacagctctgcgga

SEQ ID NO: 48767 - DNA, 23 bp, Artificial Sequence
  Synthetic: FXN 5 reverse 9:69036559-69036588; SaCas9
ccaaggtcacacagctctgcgga

SEQ ID NO: 48768 - DNA, 22 bp, Artificial Sequence
  Synthetic: FXN 5 reverse 9:69036560-69036588; SaCas9
caaggtcacacagctctgcgga

SEQ ID NO: 48769 - DNA, 21 bp, Artificial Sequence
  Synthetic: FXN 5 reverse 9:69036561-69036588; SaCas9
aaggtcacacagctctgcgga

SEQ ID NO: 48770 - DNA, 20 bp, Artificial Sequence
  Synthetic: FXN 5 reverse 9:69036562-69036588; SaCas9
aggtcacacagctctgcgga

SEQ ID NO: 48771 - DNA, 19 bp, Artificial Sequence
  Synthetic: FXN 5 reverse 9:69036563-69036588; SaCas9
ggtcacacagctctgcgga

SEQ ID NO: 48772 - DNA, 18 bp, Artificial Sequence
  Synthetic: FXN 5 reverse 9:69036564-69036588; SaCas9
gtcacacagctctgcgga

SEQ ID NO: 48773 - DNA, 25 bp, Artificial Sequence
  Synthetic: FXN 5 forward 9:69036558-69036589; SaCas9
cccactccgcagagctgtgtgacct

SEQ ID NO: 48774 - DNA, 24 bp, Artificial Sequence
  Synthetic: FXN 5 forward 9:69036559-69036589; SaCas9
ccactccgcagagctgtgtgacct

SEQ ID NO: 48775 - DNA, 23 bp, Artificial Sequence
  Synthetic: FXN 5 forward 9:69036560-69036589; SaCas9
cactccgcagagctgtgtgacct

SEQ ID NO: 48776 - DNA, 22 bp, Artificial Sequence
  Synthetic: FXN 5 forward 9:69036561-69036589; SaCas9
actccgcagagctgtgtgacct

SEQ ID NO: 48777 - DNA, 21 bp, Artificial Sequence
  Synthetic: FXN 5 forward 9:69036562-69036589; SaCas9
ctccgcagagctgtgtgacct

SEQ ID NO: 48778 - DNA, 20 bp, Artificial Sequence
  Synthetic: FXN 5 forward 9:69036563-69036589; SaCas9
tccgcagagctgtgtgacct

SEQ ID NO: 48779 - DNA, 19 bp, Artificial Sequence
  Synthetic: FXN 5 forward 9:69036564-69036589; SaCas9
ccgcagagctgtgtgacct

SEQ ID NO: 48780 - DNA, 18 bp, Artificial Sequence
  Synthetic: FXN 5 forward 9:69036565-69036589; SaCas9
cgcagagctgtgtgacct

SEQ ID NO: 48781 - DNA, 25 bp, Artificial Sequence
  Synthetic: FXN 5 forward 9:69036559-69036590; SaCas9
ccactccgcagagctgtgtgacctt

SEQ ID NO: 48782 - DNA, 24 bp, Artificial Sequence
  Synthetic: FXN 5 forward 9:69036560-69036590; SaCas9
cactccgcagagctgtgtgacctt

SEQ ID NO: 48783 - DNA, 23 bp, Artificial Sequence
  Synthetic: FXN 5 forward 9:69036561-69036590; SaCas9
actccgcagagctgtgtgacctt

SEQ ID NO: 48784 - DNA, 22 bp, Artificial Sequence
  Synthetic: FXN 5 forward 9:69036562-69036590; SaCas9
ctccgcagagctgtgtgacctt

SEQ ID NO: 48785 - DNA, 21 bp, Artificial Sequence
  Synthetic: FXN 5 forward 9:69036563-69036590; SaCas9
tccgcagagctgtgtgacctt

SEQ ID NO: 48786 - DNA, 20 bp, Artificial Sequence
  Synthetic: FXN 5 forward 9:69036564-69036590; SaCas9
ccgcagagctgtgtgacctt

SEQ ID NO: 48787 - DNA, 19 bp, Artificial Sequence
  Synthetic: FXN 5 forward 9:69036565-69036590; SaCas9
cgcagagctgtgtgacctt

SEQ ID NO: 48788 - DNA, 18 bp, Artificial Sequence
  Synthetic: FXN 5 forward 9:69036566-69036590; SaCas9
gcagagctgtgtgacctt

SEQ ID NO: 48789 - DNA, 25 bp, Artificial Sequence
  Synthetic: FXN 5 forward 9:69036560-69036591; SaCas9
cactccgcagagctgtgtgaccttg

SEQ ID NO: 48790 - DNA, 24 bp, Artificial Sequence
  Synthetic: FXN 5 forward 9:69036561-69036591; SaCas9
actccgcagagctgtgtgaccttg

SEQ ID NO: 48791 - DNA, 23 bp, Artificial Sequence
  Synthetic: FXN 5 forward 9:69036562-69036591; SaCas9
ctccgcagagctgtgtgaccttg

SEQ ID NO: 48792 - DNA, 22 bp, Artificial Sequence
  Synthetic: FXN 5 forward 9:69036563-69036591; SaCas9
tccgcagagctgtgtgaccttg

SEQ ID NO: 48793 - DNA, 21 bp, Artificial Sequence
  Synthetic: FXN 5 forward 9:69036564-69036591; SaCas9
ccgcagagctgtgtgaccttg

SEQ ID NO: 48794 - DNA, 20 bp, Artificial Sequence
  Synthetic: FXN 5 forward 9:69036565-69036591; SaCas9
cgcagagctgtgtgaccttg

SEQ ID NO: 48795 - DNA, 19 bp, Artificial Sequence
  Synthetic: FXN 5 forward 9:69036566-69036591; SaCas9
gcagagctgtgtgaccttg

SEQ ID NO: 48796 - DNA, 18 bp, Artificial Sequence
  Synthetic: FXN 5 forward 9:69036567-69036591; SaCas9
cagagctgtgtgaccttg

SEQ ID NO: 48797 - DNA, 25 bp, Artificial Sequence
  Synthetic: FXN 5 reverse 9:69036561-69036592; SaCas9
aatcccccaaggtcacacagctctg

SEQ ID NO: 48798 - DNA, 24 bp, Artificial Sequence
  Synthetic: FXN 5 reverse 9:69036562-69036592; SaCas9
atcccccaaggtcacacagctctg

SEQ ID NO: 48799 - DNA, 23 bp, Artificial Sequence
  Synthetic: FXN 5 reverse 9:69036563-69036592; SaCas9
tcccccaaggtcacacagctctg

SEQ ID NO: 48800 - DNA, 22 bp, Artificial Sequence
  Synthetic: FXN 5 reverse 9:69036564-69036592; SaCas9
cccccaaggtcacacagctctg

SEQ ID NO: 48801 - DNA, 21 bp, Artificial Sequence
  Synthetic: FXN 5 reverse 9:69036565-69036592; SaCas9
ccccaaggtcacacagctctg

SEQ ID NO: 48802 - DNA, 20 bp, Artificial Sequence
  Synthetic: FXN 5 reverse 9:69036566-69036592; SaCas9
cccaaggtcacacagctctg

SEQ ID NO: 48803 - DNA, 19 bp, Artificial Sequence
  Synthetic: FXN 5 reverse 9:69036567-69036592; SaCas9
ccaaggtcacacagctctg

SEQ ID NO: 48804 - DNA, 18 bp, Artificial Sequence
  Synthetic: FXN 5 reverse 9:69036568-69036592; SaCas9
caaggtcacacagctctg

SEQ ID NO: 48805 - DNA, 25 bp, Artificial Sequence
  Synthetic: FXN 5 reverse 9:69036562-69036593; SaCas9
gaatcccccaaggtcacacagctct

SEQ ID NO: 48806 - DNA, 24 bp, Artificial Sequence
  Synthetic: FXN 5 reverse 9:69036563-69036593; SaCas9
aatcccccaaggtcacacagctct

SEQ ID NO: 48807 - DNA, 23 bp, Artificial Sequence
  Synthetic: FXN 5 reverse 9:69036564-69036593; SaCas9
atcccccaaggtcacacagctct

SEQ ID NO: 48808 - DNA, 22 bp, Artificial Sequence
  Synthetic: FXN 5 reverse 9:69036565-69036593; SaCas9
tcccccaaggtcacacagctct

SEQ ID NO: 48809 - DNA, 21 bp, Artificial Sequence
  Synthetic: FXN 5 reverse 9:69036566-69036593; SaCas9
cccccaaggtcacacagctct

SEQ ID NO: 48810 - DNA, 20 bp, Artificial Sequence
  Synthetic: FXN 5 reverse 9:69036567-69036593; SaCas9
ccccaaggtcacacagctct

SEQ ID NO: 48811 - DNA, 19 bp, Artificial Sequence
  Synthetic: FXN 5 reverse 9:69036568-69036593; SaCas9
cccaaggtcacacagctct

SEQ ID NO: 48812 - DNA, 18 bp, Artificial Sequence
  Synthetic: FXN 5 reverse 9:69036569-69036593; SaCas9
ccaaggtcacacagctct

SEQ ID NO: 48813 - DNA, 25 bp, Artificial Sequence
  Synthetic: FXN 5 forward 9:69036579-69036610; SaCas9
accttgggggattcccctaacctct

SEQ ID NO: 48814 - DNA, 24 bp, Artificial Sequence
  Synthetic: FXN 5 forward 9:69036580-69036610; SaCas9
ccttgggggattcccctaacctct

SEQ ID NO: 48815 - DNA, 23 bp, Artificial Sequence
  Synthetic: FXN 5 forward 9:69036581-69036610; SaCas9
cttgggggattcccctaacctct

SEQ ID NO: 48816 - DNA, 22 bp, Artificial Sequence
  Synthetic: FXN 5 forward 9:69036582-69036610; SaCas9
ttgggggattcccctaacctct

SEQ ID NO: 48817 - DNA, 21 bp, Artificial Sequence
  Synthetic: FXN 5 forward 9:69036583-69036610; SaCas9
tgggggattcccctaacctct

SEQ ID NO: 48818 - DNA, 20 bp, Artificial Sequence
  Synthetic: FXN 5 forward 9:69036584-69036610; SaCas9
gggggattcccctaacctct

SEQ ID NO: 48819 - DNA, 19 bp, Artificial Sequence
  Synthetic: FXN 5 forward 9:69036585-69036610; SaCas9
ggggattcccctaacctct

SEQ ID NO: 48820 - DNA, 18 bp, Artificial Sequence
  Synthetic: FXN 5 forward 9:69036586-69036610; SaCas9
gggattcccctaacctct

SEQ ID NO: 48821 - DNA, 25 bp, Artificial Sequence
  Synthetic: FXN 5 reverse 9:69036589-69036620; SaCas9
caaagccacgtctcagagaggttag

SEQ ID NO: 48822 - DNA, 24 bp, Artificial Sequence
  Synthetic: FXN 5 reverse 9:69036590-69036620; SaCas9
aaagccacgtctcagagaggttag

SEQ ID NO: 48823 - DNA, 23 bp, Artificial Sequence
  Synthetic: FXN 5 reverse 9:69036591-69036620; SaCas9
aagccacgtctcagagaggttag

SEQ ID NO: 48824 - DNA, 22 bp, Artificial Sequence
  Synthetic: FXN 5 reverse 9:69036592-69036620; SaCas9
agccacgtctcagagaggttag

SEQ ID NO: 48825 - DNA, 21 bp, Artificial Sequence
  Synthetic: FXN 5 reverse 9:69036593-69036620; SaCas9
gccacgtctcagagaggttag

SEQ ID NO: 48826 - DNA, 20 bp, Artificial Sequence
  Synthetic: FXN 5 reverse 9:69036594-69036620; SaCas9
ccacgtctcagagaggttag

SEQ ID NO: 48827 - DNA, 19 bp, Artificial Sequence
  Synthetic: FXN 5 reverse 9:69036595-69036620; SaCas9
cacgtctcagagaggttag

SEQ ID NO: 48828 - DNA, 18 bp, Artificial Sequence
  Synthetic: FXN 5 reverse 9:69036596-69036620; SaCas9
acgtctcagagaggttag

SEQ ID NO: 48829 - DNA, 25 bp, Artificial Sequence
  Synthetic: FXN 5 reverse 9:69036590-69036621; SaCas9
acaaagccacgtctcagagaggtta

SEQ ID NO: 48830 - DNA, 24 bp, Artificial Sequence
  Synthetic: FXN 5 reverse 9:69036591-69036621; SaCas9
caaagccacgtctcagagaggtta

SEQ ID NO: 48831 - DNA, 23 bp, Artificial Sequence
  Synthetic: FXN 5 reverse 9:69036592-69036621; SaCas9
aaagccacgtctcagagaggtta

SEQ ID NO: 48832 - DNA, 22 bp, Artificial Sequence
  Synthetic: FXN 5 reverse 9:69036593-69036621; SaCas9
aagccacgtctcagagaggtta

SEQ ID NO: 48833 - DNA, 21 bp, Artificial Sequence
  Synthetic: FXN 5 reverse 9:69036594-69036621; SaCas9
agccacgtctcagagaggtta

SEQ ID NO: 48834 - DNA, 20 bp, Artificial Sequence
  Synthetic: FXN 5 reverse 9:69036595-69036621; SaCas9
gccacgtctcagagaggtta

SEQ ID NO: 48835 - DNA, 19 bp, Artificial Sequence
  Synthetic: FXN 5 reverse 9:69036596-69036621; SaCas9
ccacgtctcagagaggtta

SEQ ID NO: 48836 - DNA, 18 bp, Artificial Sequence
  Synthetic: FXN 5 reverse 9:69036597-69036621; SaCas9
cacgtctcagagaggtta

SEQ ID NO: 48837 - DNA, 25 bp, Artificial Sequence
  Synthetic: FXN 5 reverse 9:69036591-69036622; SaCas9
aacaaagccacgtctcagagaggtt

SEQ ID NO: 48838 - DNA, 24 bp, Artificial Sequence
  Synthetic: FXN 5 reverse 9:69036592-69036622; SaCas9
acaaagccacgtctcagagaggtt

SEQ ID NO: 48839 - DNA, 23 bp, Artificial Sequence
  Synthetic: FXN 5 reverse 9:69036593-69036622; SaCas9
caaagccacgtctcagagaggtt

SEQ ID NO: 48840 - DNA, 22 bp, Artificial Sequence
  Synthetic: FXN 5 reverse 9:69036594-69036622; SaCas9
aaagccacgtctcagagaggtt

SEQ ID NO: 48841 - DNA, 21 bp, Artificial Sequence
  Synthetic: FXN 5 reverse 9:69036595-69036622; SaCas9
aagccacgtctcagagaggtt

SEQ ID NO: 48842 - DNA, 20 bp, Artificial Sequence
  Synthetic: FXN 5 reverse 9:69036596-69036622; SaCas9
agccacgtctcagagaggtt

SEQ ID NO: 48843 - DNA, 19 bp, Artificial Sequence
  Synthetic: FXN 5 reverse 9:69036597-69036622; SaCas9
gccacgtctcagagaggtt

SEQ ID NO: 48844 - DNA, 18 bp, Artificial Sequence
  Synthetic: FXN 5 reverse 9:69036598-69036622; SaCas9
ccacgtctcagagaggtt

SEQ ID NO: 48845 - DNA, 25 bp, Artificial Sequence
  Synthetic: FXN 5 reverse 9:69036592-69036623; SaCas9
aaacaaagccacgtctcagagaggt

SEQ ID NO: 48846 - DNA, 24 bp, Artificial Sequence
  Synthetic: FXN 5 reverse 9:69036593-69036623; SaCas9
aacaaagccacgtctcagagaggt

SEQ ID NO: 48847 - DNA, 23 bp, Artificial Sequence
  Synthetic: FXN 5 reverse 9:69036594-69036623; SaCas9
acaaagccacgtctcagagaggt

SEQ ID NO: 48848 - DNA, 22 bp, Artificial Sequence
  Synthetic: FXN 5 reverse 9:69036595-69036623; SaCas9
caaagccacgtctcagagaggt

SEQ ID NO: 48849 - DNA, 21 bp, Artificial Sequence
  Synthetic: FXN 5 reverse 9:69036596-69036623; SaCas9
aaagccacgtctcagagaggt

SEQ ID NO: 48850 - DNA, 20 bp, Artificial Sequence
  Synthetic: FXN 5 reverse 9:69036597-69036623; SaCas9
aagccacgtctcagagaggt

SEQ ID NO: 48851 - DNA, 19 bp, Artificial Sequence
  Synthetic: FXN 5 reverse 9:69036598-69036623; SaCas9
agccacgtctcagagaggt

SEQ ID NO: 48852 - DNA, 18 bp, Artificial Sequence
  Synthetic: FXN 5 reverse 9:69036599-69036623; SaCas9
gccacgtctcagagaggt

SEQ ID NO: 48853 - DNA, 25 bp, Artificial Sequence
  Synthetic: FXN 5 reverse 9:69036599-69036630; SaCas9
ctacagaaaacaaagccacgtctca

SEQ ID NO: 48854 - DNA, 24 bp, Artificial Sequence
  Synthetic: FXN 5 reverse 9:69036600-69036630; SaCas9
tacagaaaacaaagccacgtctca

SEQ ID NO: 48855 - DNA, 23 bp, Artificial Sequence
  Synthetic: FXN 5 reverse 9:69036601-69036630; SaCas9
acagaaaacaaagccacgtctca

SEQ ID NO: 48856 - DNA, 22 bp, Artificial Sequence
  Synthetic: FXN 5 reverse 9:69036602-69036630; SaCas9
cagaaaacaaagccacgtctca

SEQ ID NO: 48857 - DNA, 21 bp, Artificial Sequence
  Synthetic: FXN 5 reverse 9:69036603-69036630; SaCas9
agaaaacaaagccacgtctca

SEQ ID NO: 48858 - DNA, 20 bp, Artificial Sequence
  Synthetic: FXN 5 reverse 9:69036604-69036630; SaCas9
gaaaacaaagccacgtctca

SEQ ID NO: 48859 - DNA, 19 bp, Artificial Sequence
  Synthetic: FXN 5 reverse 9:69036605-69036630; SaCas9
aaaacaaagccacgtctca

SEQ ID NO: 48860 - DNA, 18 bp, Artificial Sequence
  Synthetic: FXN 5 reverse 9:69036606-69036630; SaCas9
aaacaaagccacgtctca

SEQ ID NO: 48861 - DNA, 25 bp, Artificial Sequence
  Synthetic: FXN 5 reverse 9:69036601-69036632; SaCas9
ccctacagaaaacaaagccacgtct

SEQ ID NO: 48862 - DNA, 24 bp, Artificial Sequence
  Synthetic: FXN 5 reverse 9:69036602-69036632; SaCas9
cctacagaaaacaaagccacgtct

SEQ ID NO: 48863 - DNA, 23 bp, Artificial Sequence
  Synthetic: FXN 5 reverse 9:69036603-69036632; SaCas9
ctacagaaaacaaagccacgtct

SEQ ID NO: 48864 - DNA, 22 bp, Artificial Sequence
  Synthetic: FXN 5 reverse 9:69036604-69036632; SaCas9
tacagaaaacaaagccacgtct

SEQ ID NO: 48865 - DNA, 21 bp, Artificial Sequence
  Synthetic: FXN 5 reverse 9:69036605-69036632; SaCas9
acagaaaacaaagccacgtct

SEQ ID NO: 48866 - DNA, 20 bp, Artificial Sequence
  Synthetic: FXN 5 reverse 9:69036606-69036632; SaCas9
cagaaaacaaagccacgtct

SEQ ID NO: 48867 - DNA, 19 bp, Artificial Sequence
  Synthetic: FXN 5 reverse 9:69036607-69036632; SaCas9
agaaaacaaagccacgtct

SEQ ID NO: 48868 - DNA, 18 bp, Artificial Sequence
  Synthetic: FXN 5 reverse 9:69036608-69036632; SaCas9
gaaaacaaagccacgtct

SEQ ID NO: 48869 - DNA, 25 bp, Artificial Sequence
  Synthetic: FXN 5 forward 9:69036602-69036633; SaCas9
ctctgagacgtggctttgttttctg

SEQ ID NO: 48870 - DNA, 24 bp, Artificial Sequence
  Synthetic: FXN 5 forward 9:69036603-69036633; SaCas9
tctgagacgtggctttgttttctg

SEQ ID NO: 48871 - DNA, 23 bp, Artificial Sequence
  Synthetic: FXN 5 forward 9:69036604-69036633; SaCas9
ctgagacgtggctttgttttctg

SEQ ID NO: 48872 - DNA, 22 bp, Artificial Sequence
  Synthetic: FXN 5 forward 9:69036605-69036633; SaCas9
tgagacgtggctttgttttctg

SEQ ID NO: 48873 - DNA, 21 bp, Artificial Sequence
  Synthetic: FXN 5 forward 9:69036606-69036633; SaCas9
gagacgtggctttgttttctg

SEQ ID NO: 48874 - DNA, 20 bp, Artificial Sequence
  Synthetic: FXN 5 forward 9:69036607-69036633; SaCas9
agacgtggctttgttttctg

SEQ ID NO: 48875 - DNA, 19 bp, Artificial Sequence
  Synthetic: FXN 5 forward 9:69036608-69036633; SaCas9
gacgtggctttgttttctg

SEQ ID NO: 48876 - DNA, 18 bp, Artificial Sequence
  Synthetic: FXN 5 forward 9:69036609-69036633; SaCas9
acgtggctttgttttctg

SEQ ID NO: 48877 - DNA, 25 bp, Artificial Sequence
  Synthetic: FXN 5 forward 9:69036603-69036634; SaCas9
tctgagacgtggctttgttttctgt

SEQ ID NO: 48878 - DNA, 24 bp, Artificial Sequence
  Synthetic: FXN 5 forward 9:69036604-69036634; SaCas9
ctgagacgtggctttgttttctgt

SEQ ID NO: 48879 - DNA, 23 bp, Artificial Sequence
  Synthetic: FXN 5 forward 9:69036605-69036634; SaCas9
tgagacgtggctttgttttctgt

SEQ ID NO: 48880 - DNA, 22 bp, Artificial Sequence
  Synthetic: FXN 5 forward 9:69036606-69036634; SaCas9
gagacgtggctttgttttctgt

SEQ ID NO: 48881 - DNA, 21 bp, Artificial Sequence
  Synthetic: FXN 5 forward 9:69036607-69036634; SaCas9
agacgtggctttgttttctgt

SEQ ID NO: 48882 - DNA, 20 bp, Artificial Sequence
  Synthetic: FXN 5 forward 9:69036608-69036634; SaCas9
gacgtggctttgttttctgt

SEQ ID NO: 48883 - DNA, 19 bp, Artificial Sequence
  Synthetic: FXN 5 forward 9:69036609-69036634; SaCas9
acgtggctttgttttctgt

SEQ ID NO: 48884 - DNA, 18 bp, Artificial Sequence
  Synthetic: FXN 5 forward 9:69036610-69036634; SaCas9
cgtggctttgttttctgt

SEQ ID NO: 48885 - DNA, 25 bp, Artificial Sequence
  Synthetic: FXN 5 forward 9:69036604-69036635; SaCas9
ctgagacgtggctttgttttctgta

SEQ ID NO: 48886 - DNA, 24 bp, Artificial Sequence
  Synthetic: FXN 5 forward 9:69036605-69036635; SaCas9
tgagacgtggctttgttttctgta

SEQ ID NO: 48887 - DNA, 23 bp, Artificial Sequence
  Synthetic: FXN 5 forward 9:69036606-69036635; SaCas9
gagacgtggctttgttttctgta

SEQ ID NO: 48888 - DNA, 22 bp, Artificial Sequence
  Synthetic: FXN 5 forward 9:69036607-69036635; SaCas9
agacgtggctttgttttctgta

SEQ ID NO: 48889 - DNA, 21 bp, Artificial Sequence
  Synthetic: FXN 5 forward 9:69036608-69036635; SaCas9
gacgtggctttgttttctgta

SEQ ID NO: 48890 - DNA, 20 bp, Artificial Sequence
  Synthetic: FXN 5 forward 9:69036609-69036635; SaCas9
acgtggctttgttttctgta

SEQ ID NO: 48891 - DNA, 19 bp, Artificial Sequence
  Synthetic: FXN 5 forward 9:69036610-69036635; SaCas9
cgtggctttgttttctgta

SEQ ID NO: 48892 - DNA, 18 bp, Artificial Sequence
  Synthetic: FXN 5 forward 9:69036611-69036635; SaCas9
gtggctttgttttctgta

SEQ ID NO: 48893 - DNA, 25 bp, Artificial Sequence
  Synthetic: FXN 5 forward 9:69036606-69036637; SaCas9
gagacgtggctttgttttctgtagg

SEQ ID NO: 48894 - DNA, 24 bp, Artificial Sequence
  Synthetic: FXN 5 forward 9:69036607-69036637; SaCas9
agacgtggctttgttttctgtagg

SEQ ID NO: 48895 - DNA, 23 bp, Artificial Sequence
  Synthetic: FXN 5 forward 9:69036608-69036637; SaCas9
gacgtggctttgttttctgtagg

SEQ ID NO: 48896 - DNA, 22 bp, Artificial Sequence
  Synthetic: FXN 5 forward 9:69036609-69036637; SaCas9
acgtggctttgttttctgtagg

SEQ ID NO: 48897 - DNA, 21 bp, Artificial Sequence
  Synthetic: FXN 5 forward 9:69036610-69036637; SaCas9
cgtggctttgttttctgtagg

SEQ ID NO: 48898 - DNA, 20 bp, Artificial Sequence
  Synthetic: FXN 5 forward 9:69036611-69036637; SaCas9
gtggctttgttttctgtagg

SEQ ID NO: 48899 - DNA, 19 bp, Artificial Sequence
  Synthetic: FXN 5 forward 9:69036612-69036637; SaCas9
tggctttgttttctgtagg

SEQ ID NO: 48900 - DNA, 18 bp, Artificial Sequence
  Synthetic: FXN 5 forward 9:69036613-69036637; SaCas9
ggctttgttttctgtagg

SEQ ID NO: 48901 - DNA, 25 bp, Artificial Sequence
  Synthetic: FXN 5 reverse 9:69036621-69036652; SaCas9
gggcgtcacctttatcttctcccta

SEQ ID NO: 48902 - DNA, 24 bp, Artificial Sequence
  Synthetic: FXN 5 reverse 9:69036622-69036652; SaCas9
ggcgtcacctttatcttctcccta

SEQ ID NO: 48903 - DNA, 23 bp, Artificial Sequence
  Synthetic: FXN 5 reverse 9:69036623-69036652; SaCas9
gcgtcacctttatcttctcccta

SEQ ID NO: 48904 - DNA, 22 bp, Artificial Sequence
  Synthetic: FXN 5 reverse 9:69036624-69036652; SaCas9
cgtcacctttatcttctcccta

SEQ ID NO: 48905 - DNA, 21 bp, Artificial Sequence
  Synthetic: FXN 5 reverse 9:69036625-69036652; SaCas9
gtcacctttatcttctcccta

SEQ ID NO: 48906 - DNA, 20 bp, Artificial Sequence
  Synthetic: FXN 5 reverse 9:69036626-69036652; SaCas9
tcacctttatcttctcccta

SEQ ID NO: 48907 - DNA, 19 bp, Artificial Sequence
  Synthetic: FXN 5 reverse 9:69036627-69036652; SaCas9
cacctttatcttctcccta

SEQ ID NO: 48908 - DNA, 18 bp, Artificial Sequence
  Synthetic: FXN 5 reverse 9:69036628-69036652; SaCas9
acctttatcttctcccta

SEQ ID NO: 48909 - DNA, 25 bp, Artificial Sequence
  Synthetic: FXN 5 forward 9:69036632-69036663; SaCas9
agaagataaaggtgacgcccatttt

SEQ ID NO: 48910 - DNA, 24 bp, Artificial Sequence
  Synthetic: FXN 5 forward 9:69036633-69036663; SaCas9
gaagataaaggtgacgcccatttt

SEQ ID NO: 48911 - DNA, 23 bp, Artificial Sequence
  Synthetic: FXN 5 forward 9:69036634-69036663; SaCas9
aagataaaggtgacgcccatttt

SEQ ID NO: 48912 - DNA, 22 bp, Artificial Sequence
  Synthetic: FXN 5 forward 9:69036635-69036663; SaCas9
agataaaggtgacgcccatttt

SEQ ID NO: 48913 - DNA, 21 bp, Artificial Sequence
  Synthetic: FXN 5 forward 9:69036636-69036663; SaCas9
gataaaggtgacgcccatttt

SEQ ID NO: 48914 - DNA, 20 bp, Artificial Sequence
  Synthetic: FXN 5 forward 9:69036637-69036663; SaCas9
ataaaggtgacgcccatttt

SEQ ID NO: 48915 - DNA, 19 bp, Artificial Sequence
  Synthetic: FXN 5 forward 9:69036638-69036663; SaCas9
taaaggtgacgcccatttt

SEQ ID NO: 48916 - DNA, 18 bp, Artificial Sequence
  Synthetic: FXN 5 forward 9:69036639-69036663; SaCas9
aaaggtgacgcccatttt

SEQ ID NO: 48917 - DNA, 25 bp, Artificial Sequence
  Synthetic: FXN 5 forward 9:69036643-69036674; SaCas9
gtgacgcccattttgcggacctggt

SEQ ID NO: 48918 - DNA, 24 bp, Artificial Sequence
  Synthetic: FXN 5 forward 9:69036644-69036674; SaCas9
tgacgcccattttgcggacctggt

SEQ ID NO: 48919 - DNA, 23 bp, Artificial Sequence
  Synthetic: FXN 5 forward 9:69036645-69036674; SaCas9
gacgcccattttgcggacctggt

SEQ ID NO: 48920 - DNA, 22 bp, Artificial Sequence
  Synthetic: FXN 5 forward 9:69036646-69036674; SaCas9
acgcccattttgcggacctggt

SEQ ID NO: 48921 - DNA, 21 bp, Artificial Sequence
  Synthetic: FXN 5 forward 9:69036647-69036674; SaCas9
cgcccattttgcggacctggt

SEQ ID NO: 48922 - DNA, 20 bp, Artificial Sequence
  Synthetic: FXN 5 forward 9:69036648-69036674; SaCas9
gcccattttgcggacctggt

SEQ ID NO: 48923 - DNA, 19 bp, Artificial Sequence
  Synthetic: FXN 5 forward 9:69036649-69036674; SaCas9
cccattttgcggacctggt

SEQ ID NO: 48924 - DNA, 18 bp, Artificial Sequence
  Synthetic: FXN 5 forward 9:69036650-69036674; SaCas9
ccattttgcggacctggt

SEQ ID NO: 48925 - DNA, 25 bp, Artificial Sequence
  Synthetic: FXN 5 forward 9:69036645-69036676; SaCas9
gacgcccattttgcggacctggtgt

SEQ ID NO: 48926 - DNA, 24 bp, Artificial Sequence
  Synthetic: FXN 5 forward 9:69036646-69036676; SaCas9
acgcccattttgcggacctggtgt

SEQ ID NO: 48927 - DNA, 23 bp, Artificial Sequence
  Synthetic: FXN 5 forward 9:69036647-69036676; SaCas9
cgcccattttgcggacctggtgt

SEQ ID NO: 48928 - DNA, 22 bp, Artificial Sequence
  Synthetic: FXN 5 forward 9:69036648-69036676; SaCas9
gcccattttgcggacctggtgt

SEQ ID NO: 48929 - DNA, 21 bp, Artificial Sequence
  Synthetic: FXN 5 forward 9:69036649-69036676; SaCas9
cccattttgcggacctggtgt

SEQ ID NO: 48930 - DNA, 20 bp, Artificial Sequence
  Synthetic: FXN 5 forward 9:69036650-69036676; SaCas9
ccattttgcggacctggtgt

SEQ ID NO: 48931 - DNA, 19 bp, Artificial Sequence
  Synthetic: FXN 5 forward 9:69036651-69036676; SaCas9
cattttgcggacctggtgt

SEQ ID NO: 48932 - DNA, 18 bp, Artificial Sequence
  Synthetic: FXN 5 forward 9:69036652-69036676; SaCas9
attttgcggacctggtgt

SEQ ID NO: 48933 - DNA, 25 bp, Artificial Sequence
  Synthetic: FXN 5 reverse 9:69036648-69036679; SaCas9
ttaatcctcacaccaggtccgcaaa

SEQ ID NO: 48934 - DNA, 24 bp, Artificial Sequence
  Synthetic: FXN 5 reverse 9:69036649-69036679; SaCas9
taatcctcacaccaggtccgcaaa

SEQ ID NO: 48935 - DNA, 23 bp, Artificial Sequence
  Synthetic: FXN 5 reverse 9:69036650-69036679; SaCas9
aatcctcacaccaggtccgcaaa

SEQ ID NO: 48936 - DNA, 22 bp, Artificial Sequence
  Synthetic: FXN 5 reverse 9:69036651-69036679; SaCas9
atcctcacaccaggtccgcaaa

SEQ ID NO: 48937 - DNA, 21 bp, Artificial Sequence
  Synthetic: FXN 5 reverse 9:69036652-69036679; SaCas9
tcctcacaccaggtccgcaaa

SEQ ID NO: 48938 - DNA, 20 bp, Artificial Sequence
  Synthetic: FXN 5 reverse 9:69036653-69036679; SaCas9
cctcacaccaggtccgcaaa

SEQ ID NO: 48939 - DNA, 19 bp, Artificial Sequence
  Synthetic: FXN 5 reverse 9:69036654-69036679; SaCas9
ctcacaccaggtccgcaaa

SEQ ID NO: 48940 - DNA, 18 bp, Artificial Sequence
  Synthetic: FXN 5 reverse 9:69036655-69036679; SaCas9
tcacaccaggtccgcaaa

SEQ ID NO: 48941 - DNA, 25 bp, Artificial Sequence
  Synthetic: FXN 5 forward 9:69036654-69036685; SaCas9
tttgcggacctggtgtgaggattaa

SEQ ID NO: 48942 - DNA, 24 bp, Artificial Sequence
  Synthetic: FXN 5 forward 9:69036655-69036685; SaCas9
ttgcggacctggtgtgaggattaa

SEQ ID NO: 48943 - DNA, 23 bp, Artificial Sequence
  Synthetic: FXN 5 forward 9:69036656-69036685; SaCas9
tgcggacctggtgtgaggattaa

SEQ ID NO: 48944 - DNA, 22 bp, Artificial Sequence
  Synthetic: FXN 5 forward 9:69036657-69036685; SaCas9
gcggacctggtgtgaggattaa

SEQ ID NO: 48945 - DNA, 21 bp, Artificial Sequence
  Synthetic: FXN 5 forward 9:69036658-69036685; SaCas9
cggacctggtgtgaggattaa

SEQ ID NO: 48946 - DNA, 20 bp, Artificial Sequence
  Synthetic: FXN 5 forward 9:69036659-69036685; SaCas9
ggacctggtgtgaggattaa

SEQ ID NO: 48947 - DNA, 19 bp, Artificial Sequence
  Synthetic: FXN 5 forward 9:69036660-69036685; SaCas9
gacctggtgtgaggattaa

SEQ ID NO: 48948 - DNA, 18 bp, Artificial Sequence
  Synthetic: FXN 5 forward 9:69036661-69036685; SaCas9
acctggtgtgaggattaa

SEQ ID NO: 48949 - DNA, 25 bp, Artificial Sequence
  Synthetic: FXN 5 forward 9:69036655-69036686; SaCas9
ttgcggacctggtgtgaggattaaa

SEQ ID NO: 48950 - DNA, 24 bp, Artificial Sequence
  Synthetic: FXN 5 forward 9:69036656-69036686; SaCas9
tgcggacctggtgtgaggattaaa

SEQ ID NO: 48951 - DNA, 23 bp, Artificial Sequence
  Synthetic: FXN 5 forward 9:69036657-69036686; SaCas9
gcggacctggtgtgaggattaaa

SEQ ID NO: 48952 - DNA, 22 bp, Artificial Sequence
  Synthetic: FXN 5 forward 9:69036658-69036686; SaCas9
cggacctggtgtgaggattaaa

SEQ ID NO: 48953 - DNA, 21 bp, Artificial Sequence
  Synthetic: FXN 5 forward 9:69036659-69036686; SaCas9
ggacctggtgtgaggattaaa

SEQ ID NO: 48954 - DNA, 20 bp, Artificial Sequence
  Synthetic: FXN 5 forward 9:69036660-69036686; SaCas9
gacctggtgtgaggattaaa

SEQ ID NO: 48955 - DNA, 19 bp, Artificial Sequence
  Synthetic: FXN 5 forward 9:69036661-69036686; SaCas9
acctggtgtgaggattaaa

SEQ ID NO: 48956 - DNA, 18 bp, Artificial Sequence
  Synthetic: FXN 5 forward 9:69036662-69036686; SaCas9
cctggtgtgaggattaaa

SEQ ID NO: 48957 - DNA, 25 bp, Artificial Sequence
  Synthetic: FXN 5 forward 9:69036656-69036687; SaCas9
tgcggacctggtgtgaggattaaat

SEQ ID NO: 48958 - DNA, 24 bp, Artificial Sequence
  Synthetic: FXN 5 forward 9:69036657-69036687; SaCas9
gcggacctggtgtgaggattaaat

SEQ ID NO: 48959 - DNA, 23 bp, Artificial Sequence
  Synthetic: FXN 5 forward 9:69036658-69036687; SaCas9
cggacctggtgtgaggattaaat

SEQ ID NO: 48960 - DNA, 22 bp, Artificial Sequence
  Synthetic: FXN 5 forward 9:69036659-69036687; SaCas9
ggacctggtgtgaggattaaat

SEQ ID NO: 48961 - DNA, 21 bp, Artificial Sequence
  Synthetic: FXN 5 forward 9:69036660-69036687; SaCas9
gacctggtgtgaggattaaat

SEQ ID NO: 48962 - DNA, 20 bp, Artificial Sequence
  Synthetic: FXN 5 forward 9:69036661-69036687; SaCas9
acctggtgtgaggattaaat

SEQ ID NO: 48963 - DNA, 19 bp, Artificial Sequence
  Synthetic: FXN 5 forward 9:69036662-69036687; SaCas9
cctggtgtgaggattaaat

SEQ ID NO: 48964 - DNA, 18 bp, Artificial Sequence
  Synthetic: FXN 5 forward 9:69036663-69036687; SaCas9
ctggtgtgaggattaaat

SEQ ID NO: 48965 - DNA, 25 bp, Artificial Sequence
  Synthetic: FXN 5 forward 9:69036679-69036710; SaCas9
atgggaataacatagataaagtctt

SEQ ID NO: 48966 - DNA, 24 bp, Artificial Sequence
  Synthetic: FXN 5 forward 9:69036680-69036710; SaCas9
tgggaataacatagataaagtctt

SEQ ID NO: 48967 - DNA, 23 bp, Artificial Sequence
  Synthetic: FXN 5 forward 9:69036681-69036710; SaCas9
gggaataacatagataaagtctt

SEQ ID NO: 48968 - DNA, 22 bp, Artificial Sequence
  Synthetic: FXN 5 forward 9:69036682-69036710; SaCas9
ggaataacatagataaagtctt

SEQ ID NO: 48969 - DNA, 21 bp, Artificial Sequence
  Synthetic: FXN 5 forward 9:69036683-69036710; SaCas9
gaataacatagataaagtctt

SEQ ID NO: 48970 - DNA, 20 bp, Artificial Sequence
  Synthetic: FXN 5 forward 9:69036684-69036710; SaCas9
aataacatagataaagtctt

SEQ ID NO: 48971 - DNA, 19 bp, Artificial Sequence
  Synthetic: FXN 5 forward 9:69036685-69036710; SaCas9
ataacatagataaagtctt

SEQ ID NO: 48972 - DNA, 18 bp, Artificial Sequence
  Synthetic: FXN 5 forward 9:69036686-69036710; SaCas9
taacatagataaagtctt

SEQ ID NO: 48973 - DNA, 25 bp, Artificial Sequence
  Synthetic: FXN 5 reverse 9:69036701-69036732; SaCas9
aagaaaggggaactaatttgaagtt

SEQ ID NO: 48974 - DNA, 24 bp, Artificial Sequence
  Synthetic: FXN 5 reverse 9:69036702-69036732; SaCas9
agaaaggggaactaatttgaagtt

SEQ ID NO: 48975 - DNA, 23 bp, Artificial Sequence
  Synthetic: FXN 5 reverse 9:69036703-69036732; SaCas9
gaaaggggaactaatttgaagtt

SEQ ID NO: 48976 - DNA, 22 bp, Artificial Sequence
  Synthetic: FXN 5 reverse 9:69036704-69036732; SaCas9
aaaggggaactaatttgaagtt

SEQ ID NO: 48977 - DNA, 21 bp, Artificial Sequence
  Synthetic: FXN 5 reverse 9:69036705-69036732; SaCas9
aaggggaactaatttgaagtt

SEQ ID NO: 48978 - DNA, 20 bp, Artificial Sequence
  Synthetic: FXN 5 reverse 9:69036706-69036732; SaCas9
aggggaactaatttgaagtt

SEQ ID NO: 48979 - DNA, 19 bp, Artificial Sequence
  Synthetic: FXN 5 reverse 9:69036707-69036732; SaCas9
ggggaactaatttgaagtt

SEQ ID NO: 48980 - DNA, 18 bp, Artificial Sequence
  Synthetic: FXN 5 reverse 9:69036708-69036732; SaCas9
gggaactaatttgaagtt

SEQ ID NO: 48981 - DNA, 25 bp, Artificial Sequence
  Synthetic: FXN 5 reverse 9:69036709-69036740; SaCas9
cccaaaggaagaaaggggaactaat

SEQ ID NO: 48982 - DNA, 24 bp, Artificial Sequence
  Synthetic: FXN 5 reverse 9:69036710-69036740; SaCas9
ccaaaggaagaaaggggaactaat

SEQ ID NO: 48983 - DNA, 23 bp, Artificial Sequence
  Synthetic: FXN 5 reverse 9:69036711-69036740; SaCas9
caaaggaagaaaggggaactaat

SEQ ID NO: 48984 - DNA, 22 bp, Artificial Sequence
  Synthetic: FXN 5 reverse 9:69036712-69036740; SaCas9
aaaggaagaaaggggaactaat

SEQ ID NO: 48985 - DNA, 21 bp, Artificial Sequence
  Synthetic: FXN 5 reverse 9:69036713-69036740; SaCas9
aaggaagaaaggggaactaat

SEQ ID NO: 48986 - DNA, 20 bp, Artificial Sequence
  Synthetic: FXN 5 reverse 9:69036714-69036740; SaCas9
aggaagaaaggggaactaat

SEQ ID NO: 48987 - DNA, 19 bp, Artificial Sequence
  Synthetic: FXN 5 reverse 9:69036715-69036740; SaCas9
ggaagaaaggggaactaat

SEQ ID NO: 48988 - DNA, 18 bp, Artificial Sequence
  Synthetic: FXN 5 reverse 9:69036716-69036740; SaCas9
gaagaaaggggaactaat

SEQ ID NO: 48989 - DNA, 25 bp, Artificial Sequence
  Synthetic: FXN 5 forward 9:69036710-69036741; SaCas9
ttcaaattagttcccctttcttcct

SEQ ID NO: 48990 - DNA, 24 bp, Artificial Sequence
  Synthetic: FXN 5 forward 9:69036711-69036741; SaCas9
tcaaattagttcccctttcttcct

SEQ ID NO: 48991 - DNA, 23 bp, Artificial Sequence
  Synthetic: FXN 5 forward 9:69036712-69036741; SaCas9
caaattagttcccctttcttcct

SEQ ID NO: 48992 - DNA, 22 bp, Artificial Sequence
  Synthetic: FXN 5 forward 9:69036713-69036741; SaCas9
aaattagttcccctttcttcct

SEQ ID NO: 48993 - DNA, 21 bp, Artificial Sequence
  Synthetic: FXN 5 forward 9:69036714-69036741; SaCas9
aattagttcccctttcttcct

SEQ ID NO: 48994 - DNA, 20 bp, Artificial Sequence
  Synthetic: FXN 5 forward 9:69036715-69036741; SaCas9
attagttcccctttcttcct

SEQ ID NO: 48995 - DNA, 19 bp, Artificial Sequence
  Synthetic: FXN 5 forward 9:69036716-69036741; SaCas9
ttagttcccctttcttcct

SEQ ID NO: 48996 - DNA, 18 bp, Artificial Sequence
  Synthetic: FXN 5 forward 9:69036717-69036741; SaCas9
tagttcccctttcttcct

SEQ ID NO: 48997 - DNA, 25 bp, Artificial Sequence
  Synthetic: FXN 5 forward 9:69036711-69036742; SaCas9
tcaaattagttcccctttcttcctt

SEQ ID NO: 48998 - DNA, 24 bp, Artificial Sequence
  Synthetic: FXN 5 forward 9:69036712-69036742; SaCas9
caaattagttcccctttcttcctt

SEQ ID NO: 48999 - DNA, 23 bp, Artificial Sequence
  Synthetic: FXN 5 forward 9:69036713-69036742; SaCas9
aaattagttcccctttcttcctt

SEQ ID NO: 49000 - DNA, 22 bp, Artificial Sequence
  Synthetic: FXN 5 forward 9:69036714-69036742; SaCas9
aattagttcccctttcttcctt

SEQ ID NO: 49001 - DNA, 21 bp, Artificial Sequence
  Synthetic: FXN 5 forward 9:69036715-69036742; SaCas9
attagttcccctttcttcctt

SEQ ID NO: 49002 - DNA, 20 bp, Artificial Sequence
  Synthetic: FXN 5 forward 9:69036716-69036742; SaCas9
ttagttcccctttcttcctt

SEQ ID NO: 49003 - DNA, 19 bp, Artificial Sequence
  Synthetic: FXN 5 forward 9:69036717-69036742; SaCas9
tagttcccctttcttcctt

SEQ ID NO: 49004 - DNA, 18 bp, Artificial Sequence
  Synthetic: FXN 5 forward 9:69036718-69036742; SaCas9
agttcccctttcttcctt

SEQ ID NO: 49005 - DNA, 25 bp, Artificial Sequence
  Synthetic: FXN 5 forward 9:69036712-69036743; SaCas9
caaattagttcccctttcttccttt

SEQ ID NO: 49006 - DNA, 24 bp, Artificial Sequence
  Synthetic: FXN 5 forward 9:69036713-69036743; SaCas9
aaattagttcccctttcttccttt

SEQ ID NO: 49007 - DNA, 23 bp, Artificial Sequence
  Synthetic: FXN 5 forward 9:69036714-69036743; SaCas9
aattagttcccctttcttccttt

SEQ ID NO: 49008 - DNA, 22 bp, Artificial Sequence
  Synthetic: FXN 5 forward 9:69036715-69036743; SaCas9
attagttcccctttcttccttt

SEQ ID NO: 49009 - DNA, 21 bp, Artificial Sequence
  Synthetic: FXN 5 forward 9:69036716-69036743; SaCas9
ttagttcccctttcttccttt

SEQ ID NO: 49010 - DNA, 20 bp, Artificial Sequence
  Synthetic: FXN 5 forward 9:69036717-69036743; SaCas9
tagttcccctttcttccttt

SEQ ID NO: 49011 - DNA, 19 bp, Artificial Sequence
  Synthetic: FXN 5 forward 9:69036718-69036743; SaCas9
agttcccctttcttccttt

SEQ ID NO: 49012 - DNA, 18 bp, Artificial Sequence
  Synthetic: FXN 5 forward 9:69036719-69036743; SaCas9
gttcccctttcttccttt

SEQ ID NO: 49013 - DNA, 25 bp, Artificial Sequence
  Synthetic: FXN 5 forward 9:69036713-69036744; SaCas9
aaattagttcccctttcttcctttg

SEQ ID NO: 49014 - DNA, 24 bp, Artificial Sequence
  Synthetic: FXN 5 forward 9:69036714-69036744; SaCas9
aattagttcccctttcttcctttg

SEQ ID NO: 49015 - DNA, 23 bp, Artificial Sequence
  Synthetic: FXN 5 forward 9:69036715-69036744; SaCas9
attagttcccctttcttcctttg

SEQ ID NO: 49016 - DNA, 22 bp, Artificial Sequence
  Synthetic: FXN 5 forward 9:69036716-69036744; SaCas9
ttagttcccctttcttcctttg

SEQ ID NO: 49017 - DNA, 21 bp, Artificial Sequence
  Synthetic: FXN 5 forward 9:69036717-69036744; SaCas9
tagttcccctttcttcctttg

SEQ ID NO: 49018 - DNA, 20 bp, Artificial Sequence
  Synthetic: FXN 5 forward 9:69036718-69036744; SaCas9
agttcccctttcttcctttg

SEQ ID NO: 49019 - DNA, 19 bp, Artificial Sequence
  Synthetic: FXN 5 forward 9:69036719-69036744; SaCas9
gttcccctttcttcctttg

SEQ ID NO: 49020 - DNA, 18 bp, Artificial Sequence
  Synthetic: FXN 5 forward 9:69036720-69036744; SaCas9
ttcccctttcttcctttg

SEQ ID NO: 49021 - DNA, 25 bp, Artificial Sequence
  Synthetic: FXN 5 reverse 9:69036719-69036750; SaCas9
ctttgtaccccccaaaggaagaaag

SEQ ID NO: 49022 - DNA, 24 bp, Artificial Sequence
  Synthetic: FXN 5 reverse 9:69036720-69036750; SaCas9
tttgtaccccccaaaggaagaaag

SEQ ID NO: 49023 - DNA, 23 bp, Artificial Sequence
  Synthetic: FXN 5 reverse 9:69036721-69036750; SaCas9
ttgtaccccccaaaggaagaaag

SEQ ID NO: 49024 - DNA, 22 bp, Artificial Sequence
  Synthetic: FXN 5 reverse 9:69036722-69036750; SaCas9
tgtaccccccaaaggaagaaag

SEQ ID NO: 49025 - DNA, 21 bp, Artificial Sequence
  Synthetic: FXN 5 reverse 9:69036723-69036750; SaCas9
gtaccccccaaaggaagaaag

SEQ ID NO: 49026 - DNA, 20 bp, Artificial Sequence
  Synthetic: FXN 5 reverse 9:69036724-69036750; SaCas9
taccccccaaaggaagaaag

SEQ ID NO: 49027 - DNA, 19 bp, Artificial Sequence
  Synthetic: FXN 5 reverse 9:69036725-69036750; SaCas9
accccccaaaggaagaaag

SEQ ID NO: 49028 - DNA, 18 bp, Artificial Sequence
  Synthetic: FXN 5 reverse 9:69036726-69036750; SaCas9
ccccccaaaggaagaaag

SEQ ID NO: 49029 - DNA, 25 bp, Artificial Sequence
  Synthetic: FXN 5 reverse 9:69036720-69036751; SaCas9
tctttgtaccccccaaaggaagaaa

SEQ ID NO: 49030 - DNA, 24 bp, Artificial Sequence
  Synthetic: FXN 5 reverse 9:69036721-69036751; SaCas9
ctttgtaccccccaaaggaagaaa

SEQ ID NO: 49031 - DNA, 23 bp, Artificial Sequence
  Synthetic: FXN 5 reverse 9:69036722-69036751; SaCas9
tttgtaccccccaaaggaagaaa

SEQ ID NO: 49032 - DNA, 22 bp, Artificial Sequence
  Synthetic: FXN 5 reverse 9:69036723-69036751; SaCas9
ttgtaccccccaaaggaagaaa

SEQ ID NO: 49033 - DNA, 21 bp, Artificial Sequence
  Synthetic: FXN 5 reverse 9:69036724-69036751; SaCas9
tgtaccccccaaaggaagaaa

SEQ ID NO: 49034 - DNA, 20 bp, Artificial Sequence
  Synthetic: FXN 5 reverse 9:69036725-69036751; SaCas9
gtaccccccaaaggaagaaa

SEQ ID NO: 49035 - DNA, 19 bp, Artificial Sequence
  Synthetic: FXN 5 reverse 9:69036726-69036751; SaCas9
taccccccaaaggaagaaa

SEQ ID NO: 49036 - DNA, 18 bp, Artificial Sequence
  Synthetic: FXN 5 reverse 9:69036727-69036751; SaCas9
accccccaaaggaagaaa

SEQ ID NO: 49037 - DNA, 25 bp, Artificial Sequence
  Synthetic: FXN 5 reverse 9:69036721-69036752; SaCas9
ttctttgtaccccccaaaggaagaa

SEQ ID NO: 49038 - DNA, 24 bp, Artificial Sequence
  Synthetic: FXN 5 reverse 9:69036722-69036752; SaCas9
tctttgtaccccccaaaggaagaa

SEQ ID NO: 49039 - DNA, 23 bp, Artificial Sequence
  Synthetic: FXN 5 reverse 9:69036723-69036752; SaCas9
ctttgtaccccccaaaggaagaa

SEQ ID NO: 49040 - DNA, 22 bp, Artificial Sequence
  Synthetic: FXN 5 reverse 9:69036724-69036752; SaCas9
tttgtaccccccaaaggaagaa

SEQ ID NO: 49041 - DNA, 21 bp, Artificial Sequence
  Synthetic: FXN 5 reverse 9:69036725-69036752; SaCas9
ttgtaccccccaaaggaagaa

SEQ ID NO: 49042 - DNA, 20 bp, Artificial Sequence
  Synthetic: FXN 5 reverse 9:69036726-69036752; SaCas9
tgtaccccccaaaggaagaa

SEQ ID NO: 49043 - DNA, 19 bp, Artificial Sequence
  Synthetic: FXN 5 reverse 9:69036727-69036752; SaCas9
gtaccccccaaaggaagaa

SEQ ID NO: 49044 - DNA, 18 bp, Artificial Sequence
  Synthetic: FXN 5 reverse 9:69036728-69036752; SaCas9
taccccccaaaggaagaa

SEQ ID NO: 49045 - DNA, 25 bp, Artificial Sequence
  Synthetic: FXN 5 forward 9:69036722-69036753; SaCas9
cccctttcttcctttggggggtaca

SEQ ID NO: 49046 - DNA, 24 bp, Artificial Sequence
  Synthetic: FXN 5 forward 9:69036723-69036753; SaCas9
ccctttcttcctttggggggtaca

SEQ ID NO: 49047 - DNA, 23 bp, Artificial Sequence
  Synthetic: FXN 5 forward 9:69036724-69036753; SaCas9
cctttcttcctttggggggtaca

SEQ ID NO: 49048 - DNA, 22 bp, Artificial Sequence
  Synthetic: FXN 5 forward 9:69036725-69036753; SaCas9
ctttcttcctttggggggtaca

SEQ ID NO: 49049 - DNA, 21 bp, Artificial Sequence
  Synthetic: FXN 5 forward 9:69036726-69036753; SaCas9
tttcttcctttggggggtaca

SEQ ID NO: 49050 - DNA, 20 bp, Artificial Sequence
  Synthetic: FXN 5 forward 9:69036727-69036753; SaCas9
ttcttcctttggggggtaca

SEQ ID NO: 49051 - DNA, 19 bp, Artificial Sequence
  Synthetic: FXN 5 forward 9:69036728-69036753; SaCas9
tcttcctttggggggtaca

SEQ ID NO: 49052 - DNA, 18 bp, Artificial Sequence
  Synthetic: FXN 5 forward 9:69036729-69036753; SaCas9
cttcctttggggggtaca

SEQ ID NO: 49053 - DNA, 25 bp, Artificial Sequence
  Synthetic: FXN 5 reverse 9:69036722-69036753; SaCas9
tttctttgtaccccccaaaggaaga

SEQ ID NO: 49054 - DNA, 24 bp, Artificial Sequence
  Synthetic: FXN 5 reverse 9:69036723-69036753; SaCas9
ttctttgtaccccccaaaggaaga

SEQ ID NO: 49055 - DNA, 23 bp, Artificial Sequence
  Synthetic: FXN 5 reverse 9:69036724-69036753; SaCas9
tctttgtaccccccaaaggaaga

SEQ ID NO: 49056 - DNA, 22 bp, Artificial Sequence
  Synthetic: FXN 5 reverse 9:69036725-69036753; SaCas9
ctttgtaccccccaaaggaaga

SEQ ID NO: 49057 - DNA, 21 bp, Artificial Sequence
  Synthetic: FXN 5 reverse 9:69036726-69036753; SaCas9
tttgtaccccccaaaggaaga

SEQ ID NO: 49058 - DNA, 20 bp, Artificial Sequence
  Synthetic: FXN 5 reverse 9:69036727-69036753; SaCas9
ttgtaccccccaaaggaaga

SEQ ID NO: 49059 - DNA, 19 bp, Artificial Sequence
  Synthetic: FXN 5 reverse 9:69036728-69036753; SaCas9
tgtaccccccaaaggaaga

SEQ ID NO: 49060 - DNA, 18 bp, Artificial Sequence
  Synthetic: FXN 5 reverse 9:69036729-69036753; SaCas9
gtaccccccaaaggaaga

SEQ ID NO: 49061 - DNA, 25 bp, Artificial Sequence
  Synthetic: FXN 5 reverse 9:69036726-69036757; SaCas9
gatatttctttgtaccccccaaagg

SEQ ID NO: 49062 - DNA, 24 bp, Artificial Sequence
  Synthetic: FXN 5 reverse 9:69036727-69036757; SaCas9
atatttctttgtaccccccaaagg

SEQ ID NO: 49063 - DNA, 23 bp, Artificial Sequence
  Synthetic: FXN 5 reverse 9:69036728-69036757; SaCas9
tatttctttgtaccccccaaagg

SEQ ID NO: 49064 - DNA, 22 bp, Artificial Sequence
  Synthetic: FXN 5 reverse 9:69036729-69036757; SaCas9
atttctttgtaccccccaaagg

SEQ ID NO: 49065 - DNA, 21 bp, Artificial Sequence
  Synthetic: FXN 5 reverse 9:69036730-69036757; SaCas9
tttctttgtaccccccaaagg

SEQ ID NO: 49066 - DNA, 20 bp, Artificial Sequence
  Synthetic: FXN 5 reverse 9:69036731-69036757; SaCas9
ttctttgtaccccccaaagg

SEQ ID NO: 49067 - DNA, 19 bp, Artificial Sequence
  Synthetic: FXN 5 reverse 9:69036732-69036757; SaCas9
tctttgtaccccccaaagg

SEQ ID NO: 49068 - DNA, 18 bp, Artificial Sequence
  Synthetic: FXN 5 reverse 9:69036733-69036757; SaCas9
ctttgtaccccccaaagg

SEQ ID NO: 49069 - DNA, 25 bp, Artificial Sequence
  Synthetic: FXN 5 reverse 9:69036729-69036760; SaCas9
tcagatatttctttgtaccccccaa

SEQ ID NO: 49070 - DNA, 24 bp, Artificial Sequence
  Synthetic: FXN 5 reverse 9:69036730-69036760; SaCas9
cagatatttctttgtaccccccaa

SEQ ID NO: 49071 - DNA, 23 bp, Artificial Sequence
  Synthetic: FXN 5 reverse 9:69036731-69036760; SaCas9
agatatttctttgtaccccccaa

SEQ ID NO: 49072 - DNA, 22 bp, Artificial Sequence
  Synthetic: FXN 5 reverse 9:69036732-69036760; SaCas9
gatatttctttgtaccccccaa

SEQ ID NO: 49073 - DNA, 21 bp, Artificial Sequence
  Synthetic: FXN 5 reverse 9:69036733-69036760; SaCas9
atatttctttgtaccccccaa

SEQ ID NO: 49074 - DNA, 20 bp, Artificial Sequence
  Synthetic: FXN 5 reverse 9:69036734-69036760; SaCas9
tatttctttgtaccccccaa

SEQ ID NO: 49075 - DNA, 19 bp, Artificial Sequence
  Synthetic: FXN 5 reverse 9:69036735-69036760; SaCas9
atttctttgtaccccccaa

SEQ ID NO: 49076 - DNA, 18 bp, Artificial Sequence
  Synthetic: FXN 5 reverse 9:69036736-69036760; SaCas9
tttctttgtaccccccaa

SEQ ID NO: 49077 - DNA, 25 bp, Artificial Sequence
  Synthetic: FXN 5 reverse 9:69036730-69036761; SaCas9
gtcagatatttctttgtacccccca

SEQ ID NO: 49078 - DNA, 24 bp, Artificial Sequence
  Synthetic: FXN 5 reverse 9:69036731-69036761; SaCas9
tcagatatttctttgtacccccca

SEQ ID NO: 49079 - DNA, 23 bp, Artificial Sequence
  Synthetic: FXN 5 reverse 9:69036732-69036761; SaCas9
cagatatttctttgtacccccca

SEQ ID NO: 49080 - DNA, 22 bp, Artificial Sequence
  Synthetic: FXN 5 reverse 9:69036733-69036761; SaCas9
agatatttctttgtacccccca

SEQ ID NO: 49081 - DNA, 21 bp, Artificial Sequence
  Synthetic: FXN 5 reverse 9:69036734-69036761; SaCas9
gatatttctttgtacccccca

SEQ ID NO: 49082 - DNA, 20 bp, Artificial Sequence
  Synthetic: FXN 5 reverse 9:69036735-69036761; SaCas9
atatttctttgtacccccca

SEQ ID NO: 49083 - DNA, 19 bp, Artificial Sequence
  Synthetic: FXN 5 reverse 9:69036736-69036761; SaCas9
tatttctttgtacccccca

SEQ ID NO: 49084 - DNA, 18 bp, Artificial Sequence
  Synthetic: FXN 5 reverse 9:69036737-69036761; SaCas9
atttctttgtacccccca

SEQ ID NO: 49085 - DNA, 25 bp, Artificial Sequence
  Synthetic: FXN 5 forward 9:69036752-69036783; SaCas9
atatctgacccagttacgccacggc

SEQ ID NO: 49086 - DNA, 24 bp, Artificial Sequence
  Synthetic: FXN 5 forward 9:69036753-69036783; SaCas9
tatctgacccagttacgccacggc

SEQ ID NO: 49087 - DNA, 23 bp, Artificial Sequence
  Synthetic: FXN 5 forward 9:69036754-69036783; SaCas9
atctgacccagttacgccacggc

SEQ ID NO: 49088 - DNA, 22 bp, Artificial Sequence
  Synthetic: FXN 5 forward 9:69036755-69036783; SaCas9
tctgacccagttacgccacggc

SEQ ID NO: 49089 - DNA, 21 bp, Artificial Sequence
  Synthetic: FXN 5 forward 9:69036756-69036783; SaCas9
ctgacccagttacgccacggc

SEQ ID NO: 49090 - DNA, 20 bp, Artificial Sequence
  Synthetic: FXN 5 forward 9:69036757-69036783; SaCas9
tgacccagttacgccacggc

SEQ ID NO: 49091 - DNA, 19 bp, Artificial Sequence
  Synthetic: FXN 5 forward 9:69036758-69036783; SaCas9
gacccagttacgccacggc

SEQ ID NO: 49092 - DNA, 18 bp, Artificial Sequence
  Synthetic: FXN 5 forward 9:69036759-69036783; SaCas9
acccagttacgccacggc

SEQ ID NO: 49093 - DNA, 25 bp, Artificial Sequence
  Synthetic: FXN 5 forward 9:69036756-69036787; SaCas9
ctgacccagttacgccacggcttga

SEQ ID NO: 49094 - DNA, 24 bp, Artificial Sequence
  Synthetic: FXN 5 forward 9:69036757-69036787; SaCas9
tgacccagttacgccacggcttga

SEQ ID NO: 49095 - DNA, 23 bp, Artificial Sequence
  Synthetic: FXN 5 forward 9:69036758-69036787; SaCas9
gacccagttacgccacggcttga

SEQ ID NO: 49096 - DNA, 22 bp, Artificial Sequence
  Synthetic: FXN 5 forward 9:69036759-69036787; SaCas9
acccagttacgccacggcttga

SEQ ID NO: 49097 - DNA, 21 bp, Artificial Sequence
  Synthetic: FXN 5 forward 9:69036760-69036787; SaCas9
cccagttacgccacggcttga

SEQ ID NO: 49098 - DNA, 20 bp, Artificial Sequence
  Synthetic: FXN 5 forward 9:69036761-69036787; SaCas9
ccagttacgccacggcttga

SEQ ID NO: 49099 - DNA, 19 bp, Artificial Sequence
  Synthetic: FXN 5 forward 9:69036762-69036787; SaCas9
cagttacgccacggcttga

SEQ ID NO: 49100 - DNA, 18 bp, Artificial Sequence
  Synthetic: FXN 5 forward 9:69036763-69036787; SaCas9
agttacgccacggcttga

SEQ ID NO: 49101 - DNA, 25 bp, Artificial Sequence
  Synthetic: FXN 5 forward 9:69036757-69036788; SaCas9
tgacccagttacgccacggcttgaa

SEQ ID NO: 49102 - DNA, 24 bp, Artificial Sequence
  Synthetic: FXN 5 forward 9:69036758-69036788; SaCas9
gacccagttacgccacggcttgaa

SEQ ID NO: 49103 - DNA, 23 bp, Artificial Sequence
  Synthetic: FXN 5 forward 9:69036759-69036788; SaCas9
acccagttacgccacggcttgaa

SEQ ID NO: 49104 - DNA, 22 bp, Artificial Sequence
  Synthetic: FXN 5 forward 9:69036760-69036788; SaCas9
cccagttacgccacggcttgaa

SEQ ID NO: 49105 - DNA, 21 bp, Artificial Sequence
  Synthetic: FXN 5 forward 9:69036761-69036788; SaCas9
ccagttacgccacggcttgaa

SEQ ID NO: 49106 - DNA, 20 bp, Artificial Sequence
  Synthetic: FXN 5 forward 9:69036762-69036788; SaCas9
cagttacgccacggcttgaa

SEQ ID NO: 49107 - DNA, 19 bp, Artificial Sequence
  Synthetic: FXN 5 forward 9:69036763-69036788; SaCas9
agttacgccacggcttgaa

SEQ ID NO: 49108 - DNA, 18 bp, Artificial Sequence
  Synthetic: FXN 5 forward 9:69036764-69036788; SaCas9
gttacgccacggcttgaa

SEQ ID NO: 49109 - DNA, 25 bp, Artificial Sequence
  Synthetic: FXN 5 forward 9:69036759-69036790; SaCas9
acccagttacgccacggcttgaaag

SEQ ID NO: 49110 - DNA, 24 bp, Artificial Sequence
  Synthetic: FXN 5 forward 9:69036760-69036790; SaCas9
cccagttacgccacggcttgaaag

SEQ ID NO: 49111 - DNA, 23 bp, Artificial Sequence
  Synthetic: FXN 5 forward 9:69036761-69036790; SaCas9
ccagttacgccacggcttgaaag

SEQ ID NO: 49112 - DNA, 22 bp, Artificial Sequence
  Synthetic: FXN 5 forward 9:69036762-69036790; SaCas9
cagttacgccacggcttgaaag

SEQ ID NO: 49113 - DNA, 21 bp, Artificial Sequence
  Synthetic: FXN 5 forward 9:69036763-69036790; SaCas9
agttacgccacggcttgaaag

SEQ ID NO: 49114 - DNA, 20 bp, Artificial Sequence
  Synthetic: FXN 5 forward 9:69036764-69036790; SaCas9
gttacgccacggcttgaaag

SEQ ID NO: 49115 - DNA, 19 bp, Artificial Sequence
  Synthetic: FXN 5 forward 9:69036765-69036790; SaCas9
ttacgccacggcttgaaag

SEQ ID NO: 49116 - DNA, 18 bp, Artificial Sequence
  Synthetic: FXN 5 forward 9:69036766-69036790; SaCas9
tacgccacggcttgaaag

SEQ ID NO: 49117 - DNA, 25 bp, Artificial Sequence
  Synthetic: FXN 5 reverse 9:69036759-69036790; SaCas9
ttcctcctttcaagccgtggcgtaa

SEQ ID NO: 49118 - DNA, 24 bp, Artificial Sequence
  Synthetic: FXN 5 reverse 9:69036760-69036790; SaCas9
tcctcctttcaagccgtggcgtaa

SEQ ID NO: 49119 - DNA, 23 bp, Artificial Sequence
  Synthetic: FXN 5 reverse 9:69036761-69036790; SaCas9
cctcctttcaagccgtggcgtaa

SEQ ID NO: 49120 - DNA, 22 bp, Artificial Sequence
  Synthetic: FXN 5 reverse 9:69036762-69036790; SaCas9
ctcctttcaagccgtggcgtaa

SEQ ID NO: 49121 - DNA, 21 bp, Artificial Sequence
  Synthetic: FXN 5 reverse 9:69036763-69036790; SaCas9
tcctttcaagccgtggcgtaa

SEQ ID NO: 49122 - DNA, 20 bp, Artificial Sequence
  Synthetic: FXN 5 reverse 9:69036764-69036790; SaCas9
cctttcaagccgtggcgtaa

SEQ ID NO: 49123 - DNA, 19 bp, Artificial Sequence
  Synthetic: FXN 5 reverse 9:69036765-69036790; SaCas9
ctttcaagccgtggcgtaa

SEQ ID NO: 49124 - DNA, 18 bp, Artificial Sequence
  Synthetic: FXN 5 reverse 9:69036766-69036790; SaCas9
tttcaagccgtggcgtaa

SEQ ID NO: 49125 - DNA, 25 bp, Artificial Sequence
  Synthetic: FXN 5 forward 9:69036760-69036791; SaCas9
cccagttacgccacggcttgaaagg

SEQ ID NO: 49126 - DNA, 24 bp, Artificial Sequence
  Synthetic: FXN 5 forward 9:69036761-69036791; SaCas9
ccagttacgccacggcttgaaagg

SEQ ID NO: 49127 - DNA, 23 bp, Artificial Sequence
  Synthetic: FXN 5 forward 9:69036762-69036791; SaCas9
cagttacgccacggcttgaaagg

SEQ ID NO: 49128 - DNA, 22 bp, Artificial Sequence
  Synthetic: FXN 5 forward 9:69036763-69036791; SaCas9
agttacgccacggcttgaaagg

SEQ ID NO: 49129 - DNA, 21 bp, Artificial Sequence
  Synthetic: FXN 5 forward 9:69036764-69036791; SaCas9
gttacgccacggcttgaaagg

SEQ ID NO: 49130 - DNA, 20 bp, Artificial Sequence
  Synthetic: FXN 5 forward 9:69036765-69036791; SaCas9
ttacgccacggcttgaaagg

SEQ ID NO: 49131 - DNA, 19 bp, Artificial Sequence
  Synthetic: FXN 5 forward 9:69036766-69036791; SaCas9
tacgccacggcttgaaagg

SEQ ID NO: 49132 - DNA, 18 bp, Artificial Sequence
  Synthetic: FXN 5 forward 9:69036767-69036791; SaCas9
acgccacggcttgaaagg

SEQ ID NO: 49133 - DNA, 25 bp, Artificial Sequence
  Synthetic: FXN 5 forward 9:69036770-69036801; SaCas9
ccacggcttgaaaggaggaaaccca

SEQ ID NO: 49134 - DNA, 24 bp, Artificial Sequence
  Synthetic: FXN 5 forward 9:69036771-69036801; SaCas9
cacggcttgaaaggaggaaaccca

SEQ ID NO: 49135 - DNA, 23 bp, Artificial Sequence
  Synthetic: FXN 5 forward 9:69036772-69036801; SaCas9
acggcttgaaaggaggaaaccca

SEQ ID NO: 49136 - DNA, 22 bp, Artificial Sequence
  Synthetic: FXN 5 forward 9:69036773-69036801; SaCas9
cggcttgaaaggaggaaaccca

SEQ ID NO: 49137 - DNA, 21 bp, Artificial Sequence
  Synthetic: FXN 5 forward 9:69036774-69036801; SaCas9
ggcttgaaaggaggaaaccca

SEQ ID NO: 49138 - DNA, 20 bp, Artificial Sequence
  Synthetic: FXN 5 forward 9:69036775-69036801; SaCas9
gcttgaaaggaggaaaccca

SEQ ID NO: 49139 - DNA, 19 bp, Artificial Sequence
  Synthetic: FXN 5 forward 9:69036776-69036801; SaCas9
cttgaaaggaggaaaccca

SEQ ID NO: 49140 - DNA, 18 bp, Artificial Sequence
  Synthetic: FXN 5 forward 9:69036777-69036801; SaCas9
ttgaaaggaggaaaccca

SEQ ID NO: 49141 - DNA, 25 bp, Artificial Sequence
  Synthetic: FXN 5 forward 9:69036780-69036811; SaCas9
aaaggaggaaacccaaagaatggct

SEQ ID NO: 49142 - DNA, 24 bp, Artificial Sequence
  Synthetic: FXN 5 forward 9:69036781-69036811; SaCas9
aaggaggaaacccaaagaatggct

SEQ ID NO: 49143 - DNA, 23 bp, Artificial Sequence
  Synthetic: FXN 5 forward 9:69036782-69036811; SaCas9
aggaggaaacccaaagaatggct

SEQ ID NO: 49144 - DNA, 22 bp, Artificial Sequence
  Synthetic: FXN 5 forward 9:69036783-69036811; SaCas9
ggaggaaacccaaagaatggct

SEQ ID NO: 49145 - DNA, 21 bp, Artificial Sequence
  Synthetic: FXN 5 forward 9:69036784-69036811; SaCas9
gaggaaacccaaagaatggct

SEQ ID NO: 49146 - DNA, 20 bp, Artificial Sequence
  Synthetic: FXN 5 forward 9:69036785-69036811; SaCas9
aggaaacccaaagaatggct

SEQ ID NO: 49147 - DNA, 19 bp, Artificial Sequence
  Synthetic: FXN 5 forward 9:69036786-69036811; SaCas9
ggaaacccaaagaatggct

SEQ ID NO: 49148 - DNA, 18 bp, Artificial Sequence
  Synthetic: FXN 5 forward 9:69036787-69036811; SaCas9
gaaacccaaagaatggct

SEQ ID NO: 49149 - DNA, 25 bp, Artificial Sequence
  Synthetic: FXN 5 forward 9:69036781-69036812; SaCas9
aaggaggaaacccaaagaatggctg

SEQ ID NO: 49150 - DNA, 24 bp, Artificial Sequence
  Synthetic: FXN 5 forward 9:69036782-69036812; SaCas9
aggaggaaacccaaagaatggctg

SEQ ID NO: 49151 - DNA, 23 bp, Artificial Sequence
  Synthetic: FXN 5 forward 9:69036783-69036812; SaCas9
ggaggaaacccaaagaatggctg

SEQ ID NO: 49152 - DNA, 22 bp, Artificial Sequence
  Synthetic: FXN 5 forward 9:69036784-69036812; SaCas9
gaggaaacccaaagaatggctg

SEQ ID NO: 49153 - DNA, 21 bp, Artificial Sequence
  Synthetic: FXN 5 forward 9:69036785-69036812; SaCas9
aggaaacccaaagaatggctg

SEQ ID NO: 49154 - DNA, 20 bp, Artificial Sequence
  Synthetic: FXN 5 forward 9:69036786-69036812; SaCas9
ggaaacccaaagaatggctg

SEQ ID NO: 49155 - DNA, 19 bp, Artificial Sequence
  Synthetic: FXN 5 forward 9:69036787-69036812; SaCas9
gaaacccaaagaatggctg

SEQ ID NO: 49156 - DNA, 18 bp, Artificial Sequence
  Synthetic: FXN 5 forward 9:69036788-69036812; SaCas9
aaacccaaagaatggctg

SEQ ID NO: 49157 - DNA, 25 bp, Artificial Sequence
  Synthetic: FXN 5 forward 9:69036782-69036813; SaCas9
aggaggaaacccaaagaatggctgt

SEQ ID NO: 49158 - DNA, 24 bp, Artificial Sequence
  Synthetic: FXN 5 forward 9:69036783-69036813; SaCas9
ggaggaaacccaaagaatggctgt

SEQ ID NO: 49159 - DNA, 23 bp, Artificial Sequence
  Synthetic: FXN 5 forward 9:69036784-69036813; SaCas9
gaggaaacccaaagaatggctgt

SEQ ID NO: 49160 - DNA, 22 bp, Artificial Sequence
  Synthetic: FXN 5 forward 9:69036785-69036813; SaCas9
aggaaacccaaagaatggctgt

SEQ ID NO: 49161 - DNA, 21 bp, Artificial Sequence
  Synthetic: FXN 5 forward 9:69036786-69036813; SaCas9
ggaaacccaaagaatggctgt

SEQ ID NO: 49162 - DNA, 20 bp, Artificial Sequence
  Synthetic: FXN 5 forward 9:69036787-69036813; SaCas9
gaaacccaaagaatggctgt

SEQ ID NO: 49163 - DNA, 19 bp, Artificial Sequence
  Synthetic: FXN 5 forward 9:69036788-69036813; SaCas9
aaacccaaagaatggctgt

SEQ ID NO: 49164 - DNA, 18 bp, Artificial Sequence
  Synthetic: FXN 5 forward 9:69036789-69036813; SaCas9
aacccaaagaatggctgt

SEQ ID NO: 49165 - DNA, 25 bp, Artificial Sequence
  Synthetic: FXN 5 forward 9:69036786-69036817; SaCas9
ggaaacccaaagaatggctgtgggg

SEQ ID NO: 49166 - DNA, 24 bp, Artificial Sequence
  Synthetic: FXN 5 forward 9:69036787-69036817; SaCas9
gaaacccaaagaatggctgtgggg

SEQ ID NO: 49167 - DNA, 23 bp, Artificial Sequence
  Synthetic: FXN 5 forward 9:69036788-69036817; SaCas9
aaacccaaagaatggctgtgggg

SEQ ID NO: 49168 - DNA, 22 bp, Artificial Sequence
  Synthetic: FXN 5 forward 9:69036789-69036817; SaCas9
aacccaaagaatggctgtgggg

SEQ ID NO: 49169 - DNA, 21 bp, Artificial Sequence
  Synthetic: FXN 5 forward 9:69036790-69036817; SaCas9
acccaaagaatggctgtgggg

SEQ ID NO: 49170 - DNA, 20 bp, Artificial Sequence
  Synthetic: FXN 5 forward 9:69036791-69036817; SaCas9
cccaaagaatggctgtgggg

SEQ ID NO: 49171 - DNA, 19 bp, Artificial Sequence
  Synthetic: FXN 5 forward 9:69036792-69036817; SaCas9
ccaaagaatggctgtgggg

SEQ ID NO: 49172 - DNA, 18 bp, Artificial Sequence
  Synthetic: FXN 5 forward 9:69036793-69036817; SaCas9
caaagaatggctgtgggg

SEQ ID NO: 49173 - DNA, 25 bp, Artificial Sequence
  Synthetic: FXN 5 forward 9:69036788-69036819; SaCas9
aaacccaaagaatggctgtggggat

SEQ ID NO: 49174 - DNA, 24 bp, Artificial Sequence
  Synthetic: FXN 5 forward 9:69036789-69036819; SaCas9
aacccaaagaatggctgtggggat

SEQ ID NO: 49175 - DNA, 23 bp, Artificial Sequence
  Synthetic: FXN 5 forward 9:69036790-69036819; SaCas9
acccaaagaatggctgtggggat

SEQ ID NO: 49176 - DNA, 22 bp, Artificial Sequence
  Synthetic: FXN 5 forward 9:69036791-69036819; SaCas9
cccaaagaatggctgtggggat

SEQ ID NO: 49177 - DNA, 21 bp, Artificial Sequence
  Synthetic: FXN 5 forward 9:69036792-69036819; SaCas9
ccaaagaatggctgtggggat

SEQ ID NO: 49178 - DNA, 20 bp, Artificial Sequence
  Synthetic: FXN 5 forward 9:69036793-69036819; SaCas9
caaagaatggctgtggggat

SEQ ID NO: 49179 - DNA, 19 bp, Artificial Sequence
  Synthetic: FXN 5 forward 9:69036794-69036819; SaCas9
aaagaatggctgtggggat

SEQ ID NO: 49180 - DNA, 18 bp, Artificial Sequence
  Synthetic: FXN 5 forward 9:69036795-69036819; SaCas9
aagaatggctgtggggat

SEQ ID NO: 49181 - DNA, 25 bp, Artificial Sequence
  Synthetic: FXN 5 forward 9:69036789-69036820; SaCas9
aacccaaagaatggctgtggggatg

SEQ ID NO: 49182 - DNA, 24 bp, Artificial Sequence
  Synthetic: FXN 5 forward 9:69036790-69036820; SaCas9
acccaaagaatggctgtggggatg

SEQ ID NO: 49183 - DNA, 23 bp, Artificial Sequence
  Synthetic: FXN 5 forward 9:69036791-69036820; SaCas9
cccaaagaatggctgtggggatg

SEQ ID NO: 49184 - DNA, 22 bp, Artificial Sequence
  Synthetic: FXN 5 forward 9:69036792-69036820; SaCas9
ccaaagaatggctgtggggatg

SEQ ID NO: 49185 - DNA, 21 bp, Artificial Sequence
  Synthetic: FXN 5 forward 9:69036793-69036820; SaCas9
caaagaatggctgtggggatg

SEQ ID NO: 49186 - DNA, 20 bp, Artificial Sequence
  Synthetic: FXN 5 forward 9:69036794-69036820; SaCas9
aaagaatggctgtggggatg

SEQ ID NO: 49187 - DNA, 19 bp, Artificial Sequence
  Synthetic: FXN 5 forward 9:69036795-69036820; SaCas9
aagaatggctgtggggatg

SEQ ID NO: 49188 - DNA, 18 bp, Artificial Sequence
  Synthetic: FXN 5 forward 9:69036796-69036820; SaCas9
agaatggctgtggggatg

SEQ ID NO: 49189 - DNA, 25 bp, Artificial Sequence
  Synthetic: FXN 5 reverse 9:69036790-69036821; SaCas9
tcttcctcatccccacagccattct

SEQ ID NO: 49190 - DNA, 24 bp, Artificial Sequence
  Synthetic: FXN 5 reverse 9:69036791-69036821; SaCas9
cttcctcatccccacagccattct

SEQ ID NO: 49191 - DNA, 23 bp, Artificial Sequence
  Synthetic: FXN 5 reverse 9:69036792-69036821; SaCas9
ttcctcatccccacagccattct

SEQ ID NO: 49192 - DNA, 22 bp, Artificial Sequence
  Synthetic: FXN 5 reverse 9:69036793-69036821; SaCas9
tcctcatccccacagccattct

SEQ ID NO: 49193 - DNA, 21 bp, Artificial Sequence
  Synthetic: FXN 5 reverse 9:69036794-69036821; SaCas9
cctcatccccacagccattct

SEQ ID NO: 49194 - DNA, 20 bp, Artificial Sequence
  Synthetic: FXN 5 reverse 9:69036795-69036821; SaCas9
ctcatccccacagccattct

SEQ ID NO: 49195 - DNA, 19 bp, Artificial Sequence
  Synthetic: FXN 5 reverse 9:69036796-69036821; SaCas9
tcatccccacagccattct

SEQ ID NO: 49196 - DNA, 18 bp, Artificial Sequence
  Synthetic: FXN 5 reverse 9:69036797-69036821; SaCas9
catccccacagccattct

SEQ ID NO: 49197 - DNA, 25 bp, Artificial Sequence
  Synthetic: FXN 5 forward 9:69036802-69036833; SaCas9
gctgtggggatgaggaagattcctc

SEQ ID NO: 49198 - DNA, 24 bp, Artificial Sequence
  Synthetic: FXN 5 forward 9:69036803-69036833; SaCas9
ctgtggggatgaggaagattcctc

SEQ ID NO: 49199 - DNA, 23 bp, Artificial Sequence
  Synthetic: FXN 5 forward 9:69036804-69036833; SaCas9
tgtggggatgaggaagattcctc

SEQ ID NO: 49200 - DNA, 22 bp, Artificial Sequence
  Synthetic: FXN 5 forward 9:69036805-69036833; SaCas9
gtggggatgaggaagattcctc

SEQ ID NO: 49201 - DNA, 21 bp, Artificial Sequence
  Synthetic: FXN 5 forward 9:69036806-69036833; SaCas9
tggggatgaggaagattcctc

SEQ ID NO: 49202 - DNA, 20 bp, Artificial Sequence
  Synthetic: FXN 5 forward 9:69036807-69036833; SaCas9
ggggatgaggaagattcctc

SEQ ID NO: 49203 - DNA, 19 bp, Artificial Sequence
  Synthetic: FXN 5 forward 9:69036808-69036833; SaCas9
gggatgaggaagattcctc

SEQ ID NO: 49204 - DNA, 18 bp, Artificial Sequence
  Synthetic: FXN 5 forward 9:69036809-69036833; SaCas9
ggatgaggaagattcctc

SEQ ID NO: 49205 - DNA, 25 bp, Artificial Sequence
  Synthetic: FXN 5 forward 9:69036803-69036834; SaCas9
ctgtggggatgaggaagattcctca

SEQ ID NO: 49206 - DNA, 24 bp, Artificial Sequence
  Synthetic: FXN 5 forward 9:69036804-69036834; SaCas9
tgtggggatgaggaagattcctca

SEQ ID NO: 49207 - DNA, 23 bp, Artificial Sequence
  Synthetic: FXN 5 forward 9:69036805-69036834; SaCas9
gtggggatgaggaagattcctca

SEQ ID NO: 49208 - DNA, 22 bp, Artificial Sequence
  Synthetic: FXN 5 forward 9:69036806-69036834; SaCas9
tggggatgaggaagattcctca

SEQ ID NO: 49209 - DNA, 21 bp, Artificial Sequence
  Synthetic: FXN 5 forward 9:69036807-69036834; SaCas9
ggggatgaggaagattcctca

SEQ ID NO: 49210 - DNA, 20 bp, Artificial Sequence
  Synthetic: FXN 5 forward 9:69036808-69036834; SaCas9
gggatgaggaagattcctca

SEQ ID NO: 49211 - DNA, 19 bp, Artificial Sequence
  Synthetic: FXN 5 forward 9:69036809-69036834; SaCas9
ggatgaggaagattcctca

SEQ ID NO: 49212 - DNA, 18 bp, Artificial Sequence
  Synthetic: FXN 5 forward 9:69036810-69036834; SaCas9
gatgaggaagattcctca

SEQ ID NO: 49213 - DNA, 25 bp, Artificial Sequence
  Synthetic: FXN 5 forward 9:69036804-69036835; SaCas9
tgtggggatgaggaagattcctcaa

SEQ ID NO: 49214 - DNA, 24 bp, Artificial Sequence
  Synthetic: FXN 5 forward 9:69036805-69036835; SaCas9
gtggggatgaggaagattcctcaa

SEQ ID NO: 49215 - DNA, 23 bp, Artificial Sequence
  Synthetic: FXN 5 forward 9:69036806-69036835; SaCas9
tggggatgaggaagattcctcaa

SEQ ID NO: 49216 - DNA, 22 bp, Artificial Sequence
  Synthetic: FXN 5 forward 9:69036807-69036835; SaCas9
ggggatgaggaagattcctcaa

SEQ ID NO: 49217 - DNA, 21 bp, Artificial Sequence
  Synthetic: FXN 5 forward 9:69036808-69036835; SaCas9
gggatgaggaagattcctcaa

SEQ ID NO: 49218 - DNA, 20 bp, Artificial Sequence
  Synthetic: FXN 5 forward 9:69036809-69036835; SaCas9
ggatgaggaagattcctcaa

SEQ ID NO: 49219 - DNA, 19 bp, Artificial Sequence
  Synthetic: FXN 5 forward 9:69036810-69036835; SaCas9
gatgaggaagattcctcaa

SEQ ID NO: 49220 - DNA, 18 bp, Artificial Sequence
  Synthetic: FXN 5 forward 9:69036811-69036835; SaCas9
atgaggaagattcctcaa

SEQ ID NO: 49221 - DNA, 25 bp, Artificial Sequence
  Synthetic: FXN 5 forward 9:69036805-69036836; SaCas9
gtggggatgaggaagattcctcaag

SEQ ID NO: 49222 - DNA, 24 bp, Artificial Sequence
  Synthetic: FXN 5 forward 9:69036806-69036836; SaCas9
tggggatgaggaagattcctcaag

SEQ ID NO: 49223 - DNA, 23 bp, Artificial Sequence
  Synthetic: FXN 5 forward 9:69036807-69036836; SaCas9
ggggatgaggaagattcctcaag

SEQ ID NO: 49224 - DNA, 22 bp, Artificial Sequence
  Synthetic: FXN 5 forward 9:69036808-69036836; SaCas9
gggatgaggaagattcctcaag

SEQ ID NO: 49225 - DNA, 21 bp, Artificial Sequence
  Synthetic: FXN 5 forward 9:69036809-69036836; SaCas9
ggatgaggaagattcctcaag

SEQ ID NO: 49226 - DNA, 20 bp, Artificial Sequence
  Synthetic: FXN 5 forward 9:69036810-69036836; SaCas9
gatgaggaagattcctcaag

SEQ ID NO: 49227 - DNA, 19 bp, Artificial Sequence
  Synthetic: FXN 5 forward 9:69036811-69036836; SaCas9
atgaggaagattcctcaag

SEQ ID NO: 49228 - DNA, 18 bp, Artificial Sequence
  Synthetic: FXN 5 forward 9:69036812-69036836; SaCas9
tgaggaagattcctcaag

SEQ ID NO: 49229 - DNA, 25 bp, Artificial Sequence
  Synthetic: FXN 5 forward 9:69036807-69036838; SaCas9
ggggatgaggaagattcctcaaggg

SEQ ID NO: 49230 - DNA, 24 bp, Artificial Sequence
  Synthetic: FXN 5 forward 9:69036808-69036838; SaCas9
gggatgaggaagattcctcaaggg

SEQ ID NO: 49231 - DNA, 23 bp, Artificial Sequence
  Synthetic: FXN 5 forward 9:69036809-69036838; SaCas9
ggatgaggaagattcctcaaggg

SEQ ID NO: 49232 - DNA, 22 bp, Artificial Sequence
  Synthetic: FXN 5 forward 9:69036810-69036838; SaCas9
gatgaggaagattcctcaaggg

SEQ ID NO: 49233 - DNA, 21 bp, Artificial Sequence
  Synthetic: FXN 5 forward 9:69036811-69036838; SaCas9
atgaggaagattcctcaaggg

SEQ ID NO: 49234 - DNA, 20 bp, Artificial Sequence
  Synthetic: FXN 5 forward 9:69036812-69036838; SaCas9
tgaggaagattcctcaaggg

SEQ ID NO: 49235 - DNA, 19 bp, Artificial Sequence
  Synthetic: FXN 5 forward 9:69036813-69036838; SaCas9
gaggaagattcctcaaggg

SEQ ID NO: 49236 - DNA, 18 bp, Artificial Sequence
  Synthetic: FXN 5 forward 9:69036814-69036838; SaCas9
aggaagattcctcaaggg

SEQ ID NO: 49237 - DNA, 25 bp, Artificial Sequence
  Synthetic: FXN 5 reverse 9:69036820-69036851; SaCas9
cattaaataccatgtcctccccttg

SEQ ID NO: 49238 - DNA, 24 bp, Artificial Sequence
  Synthetic: FXN 5 reverse 9:69036821-69036851; SaCas9
attaaataccatgtcctccccttg

SEQ ID NO: 49239 - DNA, 23 bp, Artificial Sequence
  Synthetic: FXN 5 reverse 9:69036822-69036851; SaCas9
ttaaataccatgtcctccccttg

SEQ ID NO: 49240 - DNA, 22 bp, Artificial Sequence
  Synthetic: FXN 5 reverse 9:69036823-69036851; SaCas9
taaataccatgtcctccccttg

SEQ ID NO: 49241 - DNA, 21 bp, Artificial Sequence
  Synthetic: FXN 5 reverse 9:69036824-69036851; SaCas9
aaataccatgtcctccccttg

SEQ ID NO: 49242 - DNA, 20 bp, Artificial Sequence
  Synthetic: FXN 5 reverse 9:69036825-69036851; SaCas9
aataccatgtcctccccttg

SEQ ID NO: 49243 - DNA, 19 bp, Artificial Sequence
  Synthetic: FXN 5 reverse 9:69036826-69036851; SaCas9
ataccatgtcctccccttg

SEQ ID NO: 49244 - DNA, 18 bp, Artificial Sequence
  Synthetic: FXN 5 reverse 9:69036827-69036851; SaCas9
taccatgtcctccccttg

SEQ ID NO: 49245 - DNA, 25 bp, Artificial Sequence
  Synthetic: FXN 5 reverse 9:69036821-69036852; SaCas9
tcattaaataccatgtcctcccctt

SEQ ID NO: 49246 - DNA, 24 bp, Artificial Sequence
  Synthetic: FXN 5 reverse 9:69036822-69036852; SaCas9
cattaaataccatgtcctcccctt

SEQ ID NO: 49247 - DNA, 23 bp, Artificial Sequence
  Synthetic: FXN 5 reverse 9:69036823-69036852; SaCas9
attaaataccatgtcctcccctt

SEQ ID NO: 49248 - DNA, 22 bp, Artificial Sequence
  Synthetic: FXN 5 reverse 9:69036824-69036852; SaCas9
ttaaataccatgtcctcccctt

SEQ ID NO: 49249 - DNA, 21 bp, Artificial Sequence
  Synthetic: FXN 5 reverse 9:69036825-69036852; SaCas9
taaataccatgtcctcccctt

SEQ ID NO: 49250 - DNA, 20 bp, Artificial Sequence
  Synthetic: FXN 5 reverse 9:69036826-69036852; SaCas9
aaataccatgtcctcccctt

SEQ ID NO: 49251 - DNA, 19 bp, Artificial Sequence
  Synthetic: FXN 5 reverse 9:69036827-69036852; SaCas9
aataccatgtcctcccctt

SEQ ID NO: 49252 - DNA, 18 bp, Artificial Sequence
  Synthetic: FXN 5 reverse 9:69036828-69036852; SaCas9
ataccatgtcctcccctt

SEQ ID NO: 49253 - DNA, 25 bp, Artificial Sequence
  Synthetic: FXN 5 forward 9:69036823-69036854; SaCas9
cctcaaggggaggacatggtattta

SEQ ID NO: 49254 - DNA, 24 bp, Artificial Sequence
  Synthetic: FXN 5 forward 9:69036824-69036854; SaCas9
ctcaaggggaggacatggtattta

SEQ ID NO: 49255 - DNA, 23 bp, Artificial Sequence
  Synthetic: FXN 5 forward 9:69036825-69036854; SaCas9
tcaaggggaggacatggtattta

SEQ ID NO: 49256 - DNA, 22 bp, Artificial Sequence
  Synthetic: FXN 5 forward 9:69036826-69036854; SaCas9
caaggggaggacatggtattta

SEQ ID NO: 49257 - DNA, 21 bp, Artificial Sequence
  Synthetic: FXN 5 forward 9:69036827-69036854; SaCas9
aaggggaggacatggtattta

SEQ ID NO: 49258 - DNA, 20 bp, Artificial Sequence
  Synthetic: FXN 5 forward 9:69036828-69036854; SaCas9
aggggaggacatggtattta

SEQ ID NO: 49259 - DNA, 19 bp, Artificial Sequence
  Synthetic: FXN 5 forward 9:69036829-69036854; SaCas9
ggggaggacatggtattta

SEQ ID NO: 49260 - DNA, 18 bp, Artificial Sequence
  Synthetic: FXN 5 forward 9:69036830-69036854; SaCas9
gggaggacatggtattta

SEQ ID NO: 49261 - DNA, 25 bp, Artificial Sequence
  Synthetic: FXN 5 reverse 9:69036823-69036854; SaCas9
cctcattaaataccatgtcctcccc

SEQ ID NO: 49262 - DNA, 24 bp, Artificial Sequence
  Synthetic: FXN 5 reverse 9:69036824-69036854; SaCas9
ctcattaaataccatgtcctcccc

SEQ ID NO: 49263 - DNA, 23 bp, Artificial Sequence
  Synthetic: FXN 5 reverse 9:69036825-69036854; SaCas9
tcattaaataccatgtcctcccc

SEQ ID NO: 49264 - DNA, 22 bp, Artificial Sequence
  Synthetic: FXN 5 reverse 9:69036826-69036854; SaCas9
cattaaataccatgtcctcccc

SEQ ID NO: 49265 - DNA, 21 bp, Artificial Sequence
  Synthetic: FXN 5 reverse 9:69036827-69036854; SaCas9
attaaataccatgtcctcccc

SEQ ID NO: 49266 - DNA, 20 bp, Artificial Sequence
  Synthetic: FXN 5 reverse 9:69036828-69036854; SaCas9
ttaaataccatgtcctcccc

SEQ ID NO: 49267 - DNA, 19 bp, Artificial Sequence
  Synthetic: FXN 5 reverse 9:69036829-69036854; SaCas9
taaataccatgtcctcccc

SEQ ID NO: 49268 - DNA, 18 bp, Artificial Sequence
  Synthetic: FXN 5 reverse 9:69036830-69036854; SaCas9
aaataccatgtcctcccc

SEQ ID NO: 49269 - DNA, 25 bp, Artificial Sequence
  Synthetic: FXN 5 forward 9:69036825-69036856; SaCas9
tcaaggggaggacatggtatttaat

SEQ ID NO: 49270 - DNA, 24 bp, Artificial Sequence
  Synthetic: FXN 5 forward 9:69036826-69036856; SaCas9
caaggggaggacatggtatttaat

SEQ ID NO: 49271 - DNA, 23 bp, Artificial Sequence
  Synthetic: FXN 5 forward 9:69036827-69036856; SaCas9
aaggggaggacatggtatttaat

SEQ ID NO: 49272 - DNA, 22 bp, Artificial Sequence
  Synthetic: FXN 5 forward 9:69036828-69036856; SaCas9
aggggaggacatggtatttaat

SEQ ID NO: 49273 - DNA, 21 bp, Artificial Sequence
  Synthetic: FXN 5 forward 9:69036829-69036856; SaCas9
ggggaggacatggtatttaat

SEQ ID NO: 49274 - DNA, 20 bp, Artificial Sequence
  Synthetic: FXN 5 forward 9:69036830-69036856; SaCas9
gggaggacatggtatttaat

SEQ ID NO: 49275 - DNA, 19 bp, Artificial Sequence
  Synthetic: FXN 5 forward 9:69036831-69036856; SaCas9
ggaggacatggtatttaat

SEQ ID NO: 49276 - DNA, 18 bp, Artificial Sequence
  Synthetic: FXN 5 forward 9:69036832-69036856; SaCas9
gaggacatggtatttaat

SEQ ID NO: 49277 - DNA, 25 bp, Artificial Sequence
  Synthetic: FXN 5 forward 9:69036832-69036863; SaCas9
gaggacatggtatttaatgagggtc

SEQ ID NO: 49278 - DNA, 24 bp, Artificial Sequence
  Synthetic: FXN 5 forward 9:69036833-69036863; SaCas9
aggacatggtatttaatgagggtc

SEQ ID NO: 49279 - DNA, 23 bp, Artificial Sequence
  Synthetic: FXN 5 forward 9:69036834-69036863; SaCas9
ggacatggtatttaatgagggtc

SEQ ID NO: 49280 - DNA, 22 bp, Artificial Sequence
  Synthetic: FXN 5 forward 9:69036835-69036863; SaCas9
gacatggtatttaatgagggtc

SEQ ID NO: 49281 - DNA, 21 bp, Artificial Sequence
  Synthetic: FXN 5 forward 9:69036836-69036863; SaCas9
acatggtatttaatgagggtc

SEQ ID NO: 49282 - DNA, 20 bp, Artificial Sequence
  Synthetic: FXN 5 forward 9:69036837-69036863; SaCas9
catggtatttaatgagggtc

SEQ ID NO: 49283 - DNA, 19 bp, Artificial Sequence
  Synthetic: FXN 5 forward 9:69036838-69036863; SaCas9
atggtatttaatgagggtc

SEQ ID NO: 49284 - DNA, 18 bp, Artificial Sequence
  Synthetic: FXN 5 forward 9:69036839-69036863; SaCas9
tggtatttaatgagggtc

SEQ ID NO: 49285 - DNA, 25 bp, Artificial Sequence
  Synthetic: FXN 5 forward 9:69036843-69036874; SaCas9
atttaatgagggtcttgaagatgcc

SEQ ID NO: 49286 - DNA, 24 bp, Artificial Sequence
  Synthetic: FXN 5 forward 9:69036844-69036874; SaCas9
tttaatgagggtcttgaagatgcc

SEQ ID NO: 49287 - DNA, 23 bp, Artificial Sequence
  Synthetic: FXN 5 forward 9:69036845-69036874; SaCas9
ttaatgagggtcttgaagatgcc

SEQ ID NO: 49288 - DNA, 22 bp, Artificial Sequence
  Synthetic: FXN 5 forward 9:69036846-69036874; SaCas9
taatgagggtcttgaagatgcc

SEQ ID NO: 49289 - DNA, 21 bp, Artificial Sequence
  Synthetic: FXN 5 forward 9:69036847-69036874; SaCas9
aatgagggtcttgaagatgcc

SEQ ID NO: 49290 - DNA, 20 bp, Artificial Sequence
  Synthetic: FXN 5 forward 9:69036848-69036874; SaCas9
atgagggtcttgaagatgcc

SEQ ID NO: 49291 - DNA, 19 bp, Artificial Sequence
  Synthetic: FXN 5 forward 9:69036849-69036874; SaCas9
tgagggtcttgaagatgcc

SEQ ID NO: 49292 - DNA, 18 bp, Artificial Sequence
  Synthetic: FXN 5 forward 9:69036850-69036874; SaCas9
gagggtcttgaagatgcc

SEQ ID NO: 49293 - DNA, 25 bp, Artificial Sequence
  Synthetic: FXN 5 forward 9:69036844-69036875; SaCas9
tttaatgagggtcttgaagatgcca

SEQ ID NO: 49294 - DNA, 24 bp, Artificial Sequence
  Synthetic: FXN 5 forward 9:69036845-69036875; SaCas9
ttaatgagggtcttgaagatgcca

SEQ ID NO: 49295 - DNA, 23 bp, Artificial Sequence
  Synthetic: FXN 5 forward 9:69036846-69036875; SaCas9
taatgagggtcttgaagatgcca

SEQ ID NO: 49296 - DNA, 22 bp, Artificial Sequence
  Synthetic: FXN 5 forward 9:69036847-69036875; SaCas9
aatgagggtcttgaagatgcca

SEQ ID NO: 49297 - DNA, 21 bp, Artificial Sequence
  Synthetic: FXN 5 forward 9:69036848-69036875; SaCas9
atgagggtcttgaagatgcca

SEQ ID NO: 49298 - DNA, 20 bp, Artificial Sequence
  Synthetic: FXN 5 forward 9:69036849-69036875; SaCas9
tgagggtcttgaagatgcca

SEQ ID NO: 49299 - DNA, 19 bp, Artificial Sequence
  Synthetic: FXN 5 forward 9:69036850-69036875; SaCas9
gagggtcttgaagatgcca

SEQ ID NO: 49300 - DNA, 18 bp, Artificial Sequence
  Synthetic: FXN 5 forward 9:69036851-69036875; SaCas9
agggtcttgaagatgcca

SEQ ID NO: 49301 - DNA, 25 bp, Artificial Sequence
  Synthetic: FXN 5 forward 9:69036853-69036884; SaCas9
ggtcttgaagatgccaaggaagtgg

SEQ ID NO: 49302 - DNA, 24 bp, Artificial Sequence
  Synthetic: FXN 5 forward 9:69036854-69036884; SaCas9
gtcttgaagatgccaaggaagtgg

SEQ ID NO: 49303 - DNA, 23 bp, Artificial Sequence
  Synthetic: FXN 5 forward 9:69036855-69036884; SaCas9
tcttgaagatgccaaggaagtgg

SEQ ID NO: 49304 - DNA, 22 bp, Artificial Sequence
  Synthetic: FXN 5 forward 9:69036856-69036884; SaCas9
cttgaagatgccaaggaagtgg

SEQ ID NO: 49305 - DNA, 21 bp, Artificial Sequence
  Synthetic: FXN 5 forward 9:69036857-69036884; SaCas9
ttgaagatgccaaggaagtgg

SEQ ID NO: 49306 - DNA, 20 bp, Artificial Sequence
  Synthetic: FXN 5 forward 9:69036858-69036884; SaCas9
tgaagatgccaaggaagtgg

SEQ ID NO: 49307 - DNA, 19 bp, Artificial Sequence
  Synthetic: FXN 5 forward 9:69036859-69036884; SaCas9
gaagatgccaaggaagtgg

SEQ ID NO: 49308 - DNA, 18 bp, Artificial Sequence
  Synthetic: FXN 5 forward 9:69036860-69036884; SaCas9
aagatgccaaggaagtgg

SEQ ID NO: 49309 - DNA, 25 bp, Artificial Sequence
  Synthetic: FXN 5 forward 9:69036855-69036886; SaCas9
tcttgaagatgccaaggaagtggta

SEQ ID NO: 49310 - DNA, 24 bp, Artificial Sequence
  Synthetic: FXN 5 forward 9:69036856-69036886; SaCas9
cttgaagatgccaaggaagtggta

SEQ ID NO: 49311 - DNA, 23 bp, Artificial Sequence
  Synthetic: FXN 5 forward 9:69036857-69036886; SaCas9
ttgaagatgccaaggaagtggta

SEQ ID NO: 49312 - DNA, 22 bp, Artificial Sequence
  Synthetic: FXN 5 forward 9:69036858-69036886; SaCas9
tgaagatgccaaggaagtggta

SEQ ID NO: 49313 - DNA, 21 bp, Artificial Sequence
  Synthetic: FXN 5 forward 9:69036859-69036886; SaCas9
gaagatgccaaggaagtggta

SEQ ID NO: 49314 - DNA, 20 bp, Artificial Sequence
  Synthetic: FXN 5 forward 9:69036860-69036886; SaCas9
aagatgccaaggaagtggta

SEQ ID NO: 49315 - DNA, 19 bp, Artificial Sequence
  Synthetic: FXN 5 forward 9:69036861-69036886; SaCas9
agatgccaaggaagtggta

SEQ ID NO: 49316 - DNA, 18 bp, Artificial Sequence
  Synthetic: FXN 5 forward 9:69036862-69036886; SaCas9
gatgccaaggaagtggta

SEQ ID NO: 49317 - DNA, 25 bp, Artificial Sequence
  Synthetic: FXN 5 forward 9:69036866-69036897; SaCas9
ccaaggaagtggtagagggtgtttc

SEQ ID NO: 49318 - DNA, 24 bp, Artificial Sequence
  Synthetic: FXN 5 forward 9:69036867-69036897; SaCas9
caaggaagtggtagagggtgtttc

SEQ ID NO: 49319 - DNA, 23 bp, Artificial Sequence
  Synthetic: FXN 5 forward 9:69036868-69036897; SaCas9
aaggaagtggtagagggtgtttc

SEQ ID NO: 49320 - DNA, 22 bp, Artificial Sequence
  Synthetic: FXN 5 forward 9:69036869-69036897; SaCas9
aggaagtggtagagggtgtttc

SEQ ID NO: 49321 - DNA, 21 bp, Artificial Sequence
  Synthetic: FXN 5 forward 9:69036870-69036897; SaCas9
ggaagtggtagagggtgtttc

SEQ ID NO: 49322 - DNA, 20 bp, Artificial Sequence
  Synthetic: FXN 5 forward 9:69036871-69036897; SaCas9
gaagtggtagagggtgtttc

SEQ ID NO: 49323 - DNA, 19 bp, Artificial Sequence
  Synthetic: FXN 5 forward 9:69036872-69036897; SaCas9
aagtggtagagggtgtttc

SEQ ID NO: 49324 - DNA, 18 bp, Artificial Sequence
  Synthetic: FXN 5 forward 9:69036873-69036897; SaCas9
agtggtagagggtgtttc

SEQ ID NO: 49325 - DNA, 25 bp, Artificial Sequence
  Synthetic: FXN 5 forward 9:69036868-69036899; SaCas9
aaggaagtggtagagggtgtttcac

SEQ ID NO: 49326 - DNA, 24 bp, Artificial Sequence
  Synthetic: FXN 5 forward 9:69036869-69036899; SaCas9
aggaagtggtagagggtgtttcac

SEQ ID NO: 49327 - DNA, 23 bp, Artificial Sequence
  Synthetic: FXN 5 forward 9:69036870-69036899; SaCas9
ggaagtggtagagggtgtttcac

SEQ ID NO: 49328 - DNA, 22 bp, Artificial Sequence
  Synthetic: FXN 5 forward 9:69036871-69036899; SaCas9
gaagtggtagagggtgtttcac

SEQ ID NO: 49329 - DNA, 21 bp, Artificial Sequence
  Synthetic: FXN 5 forward 9:69036872-69036899; SaCas9
aagtggtagagggtgtttcac

SEQ ID NO: 49330 - DNA, 20 bp, Artificial Sequence
  Synthetic: FXN 5 forward 9:69036873-69036899; SaCas9
agtggtagagggtgtttcac

SEQ ID NO: 49331 - DNA, 19 bp, Artificial Sequence
  Synthetic: FXN 5 forward 9:69036874-69036899; SaCas9
gtggtagagggtgtttcac

SEQ ID NO: 49332 - DNA, 18 bp, Artificial Sequence
  Synthetic: FXN 5 forward 9:69036875-69036899; SaCas9
tggtagagggtgtttcac

SEQ ID NO: 49333 - DNA, 25 bp, Artificial Sequence
  Synthetic: FXN 5 forward 9:69036869-69036900; SaCas9
aggaagtggtagagggtgtttcacg

SEQ ID NO: 49334 - DNA, 24 bp, Artificial Sequence
  Synthetic: FXN 5 forward 9:69036870-69036900; SaCas9
ggaagtggtagagggtgtttcacg

SEQ ID NO: 49335 - DNA, 23 bp, Artificial Sequence
  Synthetic: FXN 5 forward 9:69036871-69036900; SaCas9
gaagtggtagagggtgtttcacg

SEQ ID NO: 49336 - DNA, 22 bp, Artificial Sequence
  Synthetic: FXN 5 forward 9:69036872-69036900; SaCas9
aagtggtagagggtgtttcacg

SEQ ID NO: 49337 - DNA, 21 bp, Artificial Sequence
  Synthetic: FXN 5 forward 9:69036873-69036900; SaCas9
agtggtagagggtgtttcacg

SEQ ID NO: 49338 - DNA, 20 bp, Artificial Sequence
  Synthetic: FXN 5 forward 9:69036874-69036900; SaCas9
gtggtagagggtgtttcacg

SEQ ID NO: 49339 - DNA, 19 bp, Artificial Sequence
  Synthetic: FXN 5 forward 9:69036875-69036900; SaCas9
tggtagagggtgtttcacg

SEQ ID NO: 49340 - DNA, 18 bp, Artificial Sequence
  Synthetic: FXN 5 forward 9:69036876-69036900; SaCas9
ggtagagggtgtttcacg

SEQ ID NO: 49341 - DNA, 25 bp, Artificial Sequence
  Synthetic: FXN 5 forward 9:69036871-69036902; SaCas9
gaagtggtagagggtgtttcacgag

SEQ ID NO: 49342 - DNA, 24 bp, Artificial Sequence
  Synthetic: FXN 5 forward 9:69036872-69036902; SaCas9
aagtggtagagggtgtttcacgag

SEQ ID NO: 49343 - DNA, 23 bp, Artificial Sequence
  Synthetic: FXN 5 forward 9:69036873-69036902; SaCas9
agtggtagagggtgtttcacgag

SEQ ID NO: 49344 - DNA, 22 bp, Artificial Sequence
  Synthetic: FXN 5 forward 9:69036874-69036902; SaCas9
gtggtagagggtgtttcacgag

SEQ ID NO: 49345 - DNA, 21 bp, Artificial Sequence
  Synthetic: FXN 5 forward 9:69036875-69036902; SaCas9
tggtagagggtgtttcacgag

SEQ ID NO: 49346 - DNA, 20 bp, Artificial Sequence
  Synthetic: FXN 5 forward 9:69036876-69036902; SaCas9
ggtagagggtgtttcacgag

SEQ ID NO: 49347 - DNA, 19 bp, Artificial Sequence
  Synthetic: FXN 5 forward 9:69036877-69036902; SaCas9
gtagagggtgtttcacgag

SEQ ID NO: 49348 - DNA, 18 bp, Artificial Sequence
  Synthetic: FXN 5 forward 9:69036878-69036902; SaCas9
tagagggtgtttcacgag

SEQ ID NO: 49349 - DNA, 25 bp, Artificial Sequence
  Synthetic: FXN 5 forward 9:69036872-69036903; SaCas9
aagtggtagagggtgtttcacgagg

SEQ ID NO: 49350 - DNA, 24 bp, Artificial Sequence
  Synthetic: FXN 5 forward 9:69036873-69036903; SaCas9
agtggtagagggtgtttcacgagg

SEQ ID NO: 49351 - DNA, 23 bp, Artificial Sequence
  Synthetic: FXN 5 forward 9:69036874-69036903; SaCas9
gtggtagagggtgtttcacgagg

SEQ ID NO: 49352 - DNA, 22 bp, Artificial Sequence
  Synthetic: FXN 5 forward 9:69036875-69036903; SaCas9
tggtagagggtgtttcacgagg

SEQ ID NO: 49353 - DNA, 21 bp, Artificial Sequence
  Synthetic: FXN 5 forward 9:69036876-69036903; SaCas9
ggtagagggtgtttcacgagg

SEQ ID NO: 49354 - DNA, 20 bp, Artificial Sequence
  Synthetic: FXN 5 forward 9:69036877-69036903; SaCas9
gtagagggtgtttcacgagg

SEQ ID NO: 49355 - DNA, 19 bp, Artificial Sequence
  Synthetic: FXN 5 forward 9:69036878-69036903; SaCas9
tagagggtgtttcacgagg

SEQ ID NO: 49356 - DNA, 18 bp, Artificial Sequence
  Synthetic: FXN 5 forward 9:69036879-69036903; SaCas9
agagggtgtttcacgagg

SEQ ID NO: 49357 - DNA, 25 bp, Artificial Sequence
  Synthetic: FXN 5 forward 9:69036873-69036904; SaCas9
agtggtagagggtgtttcacgagga

SEQ ID NO: 49358 - DNA, 24 bp, Artificial Sequence
  Synthetic: FXN 5 forward 9:69036874-69036904; SaCas9
gtggtagagggtgtttcacgagga

SEQ ID NO: 49359 - DNA, 23 bp, Artificial Sequence
  Synthetic: FXN 5 forward 9:69036875-69036904; SaCas9
tggtagagggtgtttcacgagga

SEQ ID NO: 49360 - DNA, 22 bp, Artificial Sequence
  Synthetic: FXN 5 forward 9:69036876-69036904; SaCas9
ggtagagggtgtttcacgagga

SEQ ID NO: 49361 - DNA, 21 bp, Artificial Sequence
  Synthetic: FXN 5 forward 9:69036877-69036904; SaCas9
gtagagggtgtttcacgagga

SEQ ID NO: 49362 - DNA, 20 bp, Artificial Sequence
  Synthetic: FXN 5 forward 9:69036878-69036904; SaCas9
tagagggtgtttcacgagga

SEQ ID NO: 49363 - DNA, 19 bp, Artificial Sequence
  Synthetic: FXN 5 forward 9:69036879-69036904; SaCas9
agagggtgtttcacgagga

SEQ ID NO: 49364 - DNA, 18 bp, Artificial Sequence
  Synthetic: FXN 5 forward 9:69036880-69036904; SaCas9
gagggtgtttcacgagga

SEQ ID NO: 49365 - DNA, 25 bp, Artificial Sequence
  Synthetic: FXN 5 forward 9:69036882-69036913; SaCas9
gggtgtttcacgaggagggaaccgt

SEQ ID NO: 49366 - DNA, 24 bp, Artificial Sequence
  Synthetic: FXN 5 forward 9:69036883-69036913; SaCas9
ggtgtttcacgaggagggaaccgt

SEQ ID NO: 49367 - DNA, 23 bp, Artificial Sequence
  Synthetic: FXN 5 forward 9:69036884-69036913; SaCas9
gtgtttcacgaggagggaaccgt

SEQ ID NO: 49368 - DNA, 22 bp, Artificial Sequence
  Synthetic: FXN 5 forward 9:69036885-69036913; SaCas9
tgtttcacgaggagggaaccgt

SEQ ID NO: 49369 - DNA, 21 bp, Artificial Sequence
  Synthetic: FXN 5 forward 9:69036886-69036913; SaCas9
gtttcacgaggagggaaccgt

SEQ ID NO: 49370 - DNA, 20 bp, Artificial Sequence
  Synthetic: FXN 5 forward 9:69036887-69036913; SaCas9
tttcacgaggagggaaccgt

SEQ ID NO: 49371 - DNA, 19 bp, Artificial Sequence
  Synthetic: FXN 5 forward 9:69036888-69036913; SaCas9
ttcacgaggagggaaccgt

SEQ ID NO: 49372 - DNA, 18 bp, Artificial Sequence
  Synthetic: FXN 5 forward 9:69036889-69036913; SaCas9
tcacgaggagggaaccgt

SEQ ID NO: 49373 - DNA, 25 bp, Artificial Sequence
  Synthetic: FXN 5 reverse 9:69036887-69036918; SaCas9
cctttgcccagacggttccctcctc

SEQ ID NO: 49374 - DNA, 24 bp, Artificial Sequence
  Synthetic: FXN 5 reverse 9:69036888-69036918; SaCas9
ctttgcccagacggttccctcctc

SEQ ID NO: 49375 - DNA, 23 bp, Artificial Sequence
  Synthetic: FXN 5 reverse 9:69036889-69036918; SaCas9
tttgcccagacggttccctcctc

SEQ ID NO: 49376 - DNA, 22 bp, Artificial Sequence
  Synthetic: FXN 5 reverse 9:69036890-69036918; SaCas9
ttgcccagacggttccctcctc

SEQ ID NO: 49377 - DNA, 21 bp, Artificial Sequence
  Synthetic: FXN 5 reverse 9:69036891-69036918; SaCas9
tgcccagacggttccctcctc

SEQ ID NO: 49378 - DNA, 20 bp, Artificial Sequence
  Synthetic: FXN 5 reverse 9:69036892-69036918; SaCas9
gcccagacggttccctcctc

SEQ ID NO: 49379 - DNA, 19 bp, Artificial Sequence
  Synthetic: FXN 5 reverse 9:69036893-69036918; SaCas9
cccagacggttccctcctc

SEQ ID NO: 49380 - DNA, 18 bp, Artificial Sequence
  Synthetic: FXN 5 reverse 9:69036894-69036918; SaCas9
ccagacggttccctcctc

SEQ ID NO: 49381 - DNA, 25 bp, Artificial Sequence
  Synthetic: FXN 5 forward 9:69036894-69036925; SaCas9
aggagggaaccgtctgggcaaaggc

SEQ ID NO: 49382 - DNA, 24 bp, Artificial Sequence
  Synthetic: FXN 5 forward 9:69036895-69036925; SaCas9
ggagggaaccgtctgggcaaaggc

SEQ ID NO: 49383 - DNA, 23 bp, Artificial Sequence
  Synthetic: FXN 5 forward 9:69036896-69036925; SaCas9
gagggaaccgtctgggcaaaggc

SEQ ID NO: 49384 - DNA, 22 bp, Artificial Sequence
  Synthetic: FXN 5 forward 9:69036897-69036925; SaCas9
agggaaccgtctgggcaaaggc

SEQ ID NO: 49385 - DNA, 21 bp, Artificial Sequence
  Synthetic: FXN 5 forward 9:69036898-69036925; SaCas9
gggaaccgtctgggcaaaggc

SEQ ID NO: 49386 - DNA, 20 bp, Artificial Sequence
  Synthetic: FXN 5 forward 9:69036899-69036925; SaCas9
ggaaccgtctgggcaaaggc

SEQ ID NO: 49387 - DNA, 19 bp, Artificial Sequence
  Synthetic: FXN 5 forward 9:69036900-69036925; SaCas9
gaaccgtctgggcaaaggc

SEQ ID NO: 49388 - DNA, 18 bp, Artificial Sequence
  Synthetic: FXN 5 forward 9:69036901-69036925; SaCas9
aaccgtctgggcaaaggc

SEQ ID NO: 49389 - DNA, 25 bp, Artificial Sequence
  Synthetic: FXN 5 forward 9:69036895-69036926; SaCas9
ggagggaaccgtctgggcaaaggcc

SEQ ID NO: 49390 - DNA, 24 bp, Artificial Sequence
  Synthetic: FXN 5 forward 9:69036896-69036926; SaCas9
gagggaaccgtctgggcaaaggcc

SEQ ID NO: 49391 - DNA, 23 bp, Artificial Sequence
  Synthetic: FXN 5 forward 9:69036897-69036926; SaCas9
agggaaccgtctgggcaaaggcc

SEQ ID NO: 49392 - DNA, 22 bp, Artificial Sequence
  Synthetic: FXN 5 forward 9:69036898-69036926; SaCas9
gggaaccgtctgggcaaaggcc

SEQ ID NO: 49393 - DNA, 21 bp, Artificial Sequence
  Synthetic: FXN 5 forward 9:69036899-69036926; SaCas9
ggaaccgtctgggcaaaggcc

SEQ ID NO: 49394 - DNA, 20 bp, Artificial Sequence
  Synthetic: FXN 5 forward 9:69036900-69036926; SaCas9
gaaccgtctgggcaaaggcc

SEQ ID NO: 49395 - DNA, 19 bp, Artificial Sequence
  Synthetic: FXN 5 forward 9:69036901-69036926; SaCas9
aaccgtctgggcaaaggcc

SEQ ID NO: 49396 - DNA, 18 bp, Artificial Sequence
  Synthetic: FXN 5 forward 9:69036902-69036926; SaCas9
accgtctgggcaaaggcc

SEQ ID NO: 49397 - DNA, 25 bp, Artificial Sequence
  Synthetic: FXN 5 forward 9:69036901-69036932; SaCas9
aaccgtctgggcaaaggccaggaag

SEQ ID NO: 49398 - DNA, 24 bp, Artificial Sequence
  Synthetic: FXN 5 forward 9:69036902-69036932; SaCas9
accgtctgggcaaaggccaggaag

SEQ ID NO: 49399 - DNA, 23 bp, Artificial Sequence
  Synthetic: FXN 5 forward 9:69036903-69036932; SaCas9
ccgtctgggcaaaggccaggaag

SEQ ID NO: 49400 - DNA, 22 bp, Artificial Sequence
  Synthetic: FXN 5 forward 9:69036904-69036932; SaCas9
cgtctgggcaaaggccaggaag

SEQ ID NO: 49401 - DNA, 21 bp, Artificial Sequence
  Synthetic: FXN 5 forward 9:69036905-69036932; SaCas9
gtctgggcaaaggccaggaag

SEQ ID NO: 49402 - DNA, 20 bp, Artificial Sequence
  Synthetic: FXN 5 forward 9:69036906-69036932; SaCas9
tctgggcaaaggccaggaag

SEQ ID NO: 49403 - DNA, 19 bp, Artificial Sequence
  Synthetic: FXN 5 forward 9:69036907-69036932; SaCas9
ctgggcaaaggccaggaag

SEQ ID NO: 49404 - DNA, 18 bp, Artificial Sequence
  Synthetic: FXN 5 forward 9:69036908-69036932; SaCas9
tgggcaaaggccaggaag

SEQ ID NO: 49405 - DNA, 25 bp, Artificial Sequence
  Synthetic: FXN 5 forward 9:69036902-69036933; SaCas9
accgtctgggcaaaggccaggaagg

SEQ ID NO: 49406 - DNA, 24 bp, Artificial Sequence
  Synthetic: FXN 5 forward 9:69036903-69036933; SaCas9
ccgtctgggcaaaggccaggaagg

SEQ ID NO: 49407 - DNA, 23 bp, Artificial Sequence
  Synthetic: FXN 5 forward 9:69036904-69036933; SaCas9
cgtctgggcaaaggccaggaagg

SEQ ID NO: 49408 - DNA, 22 bp, Artificial Sequence
  Synthetic: FXN 5 forward 9:69036905-69036933; SaCas9
gtctgggcaaaggccaggaagg

SEQ ID NO: 49409 - DNA, 21 bp, Artificial Sequence
  Synthetic: FXN 5 forward 9:69036906-69036933; SaCas9
tctgggcaaaggccaggaagg

SEQ ID NO: 49410 - DNA, 20 bp, Artificial Sequence
  Synthetic: FXN 5 forward 9:69036907-69036933; SaCas9
ctgggcaaaggccaggaagg

SEQ ID NO: 49411 - DNA, 19 bp, Artificial Sequence
  Synthetic: FXN 5 forward 9:69036908-69036933; SaCas9
tgggcaaaggccaggaagg

SEQ ID NO: 49412 - DNA, 18 bp, Artificial Sequence
  Synthetic: FXN 5 forward 9:69036909-69036933; SaCas9
gggcaaaggccaggaagg

SEQ ID NO: 49413 - DNA, 25 bp, Artificial Sequence
  Synthetic: FXN 5 forward 9:69036905-69036936; SaCas9
gtctgggcaaaggccaggaaggcgg

SEQ ID NO: 49414 - DNA, 24 bp, Artificial Sequence
  Synthetic: FXN 5 forward 9:69036906-69036936; SaCas9
tctgggcaaaggccaggaaggcgg

SEQ ID NO: 49415 - DNA, 23 bp, Artificial Sequence
  Synthetic: FXN 5 forward 9:69036907-69036936; SaCas9
ctgggcaaaggccaggaaggcgg

SEQ ID NO: 49416 - DNA, 22 bp, Artificial Sequence
  Synthetic: FXN 5 forward 9:69036908-69036936; SaCas9
tgggcaaaggccaggaaggcgg

SEQ ID NO: 49417 - DNA, 21 bp, Artificial Sequence
  Synthetic: FXN 5 forward 9:69036909-69036936; SaCas9
gggcaaaggccaggaaggcgg

SEQ ID NO: 49418 - DNA, 20 bp, Artificial Sequence
  Synthetic: FXN 5 forward 9:69036910-69036936; SaCas9
ggcaaaggccaggaaggcgg

SEQ ID NO: 49419 - DNA, 19 bp, Artificial Sequence
  Synthetic: FXN 5 forward 9:69036911-69036936; SaCas9
gcaaaggccaggaaggcgg

SEQ ID NO: 49420 - DNA, 18 bp, Artificial Sequence
  Synthetic: FXN 5 forward 9:69036912-69036936; SaCas9
caaaggccaggaaggcgg

SEQ ID NO: 49421 - DNA, 25 bp, Artificial Sequence
  Synthetic: FXN 5 forward 9:69036906-69036937; SaCas9
tctgggcaaaggccaggaaggcgga

SEQ ID NO: 49422 - DNA, 24 bp, Artificial Sequence
  Synthetic: FXN 5 forward 9:69036907-69036937; SaCas9
ctgggcaaaggccaggaaggcgga

SEQ ID NO: 49423 - DNA, 23 bp, Artificial Sequence
  Synthetic: FXN 5 forward 9:69036908-69036937; SaCas9
tgggcaaaggccaggaaggcgga

SEQ ID NO: 49424 - DNA, 22 bp, Artificial Sequence
  Synthetic: FXN 5 forward 9:69036909-69036937; SaCas9
gggcaaaggccaggaaggcgga

SEQ ID NO: 49425 - DNA, 21 bp, Artificial Sequence
  Synthetic: FXN 5 forward 9:69036910-69036937; SaCas9
ggcaaaggccaggaaggcgga

SEQ ID NO: 49426 - DNA, 20 bp, Artificial Sequence
  Synthetic: FXN 5 forward 9:69036911-69036937; SaCas9
gcaaaggccaggaaggcgga

SEQ ID NO: 49427 - DNA, 19 bp, Artificial Sequence
  Synthetic: FXN 5 forward 9:69036912-69036937; SaCas9
caaaggccaggaaggcgga

SEQ ID NO: 49428 - DNA, 18 bp, Artificial Sequence
  Synthetic: FXN 5 forward 9:69036913-69036937; SaCas9
aaaggccaggaaggcgga

SEQ ID NO: 49429 - DNA, 25 bp, Artificial Sequence
  Synthetic: FXN 5 forward 9:69036907-69036938; SaCas9
ctgggcaaaggccaggaaggcggaa

SEQ ID NO: 49430 - DNA, 24 bp, Artificial Sequence
  Synthetic: FXN 5 forward 9:69036908-69036938; SaCas9
tgggcaaaggccaggaaggcggaa

SEQ ID NO: 49431 - DNA, 23 bp, Artificial Sequence
  Synthetic: FXN 5 forward 9:69036909-69036938; SaCas9
gggcaaaggccaggaaggcggaa

SEQ ID NO: 49432 - DNA, 22 bp, Artificial Sequence
  Synthetic: FXN 5 forward 9:69036910-69036938; SaCas9
ggcaaaggccaggaaggcggaa

SEQ ID NO: 49433 - DNA, 21 bp, Artificial Sequence
  Synthetic: FXN 5 forward 9:69036911-69036938; SaCas9
gcaaaggccaggaaggcggaa

SEQ ID NO: 49434 - DNA, 20 bp, Artificial Sequence
  Synthetic: FXN 5 forward 9:69036912-69036938; SaCas9
caaaggccaggaaggcggaa

SEQ ID NO: 49435 - DNA, 19 bp, Artificial Sequence
  Synthetic: FXN 5 forward 9:69036913-69036938; SaCas9
aaaggccaggaaggcggaa

SEQ ID NO: 49436 - DNA, 18 bp, Artificial Sequence
  Synthetic: FXN 5 forward 9:69036914-69036938; SaCas9
aaggccaggaaggcggaa

SEQ ID NO: 49437 - DNA, 25 bp, Artificial Sequence
  Synthetic: FXN 5 forward 9:69036918-69036949; SaCas9
ccaggaaggcggaaggggatccctt

SEQ ID NO: 49438 - DNA, 24 bp, Artificial Sequence
  Synthetic: FXN 5 forward 9:69036919-69036949; SaCas9
caggaaggcggaaggggatccctt

SEQ ID NO: 49439 - DNA, 23 bp, Artificial Sequence
  Synthetic: FXN 5 forward 9:69036920-69036949; SaCas9
aggaaggcggaaggggatccctt

SEQ ID NO: 49440 - DNA, 22 bp, Artificial Sequence
  Synthetic: FXN 5 forward 9:69036921-69036949; SaCas9
ggaaggcggaaggggatccctt

SEQ ID NO: 49441 - DNA, 21 bp, Artificial Sequence
  Synthetic: FXN 5 forward 9:69036922-69036949; SaCas9
gaaggcggaaggggatccctt

SEQ ID NO: 49442 - DNA, 20 bp, Artificial Sequence
  Synthetic: FXN 5 forward 9:69036923-69036949; SaCas9
aaggcggaaggggatccctt

SEQ ID NO: 49443 - DNA, 19 bp, Artificial Sequence
  Synthetic: FXN 5 forward 9:69036924-69036949; SaCas9
aggcggaaggggatccctt

SEQ ID NO: 49444 - DNA, 18 bp, Artificial Sequence
  Synthetic: FXN 5 forward 9:69036925-69036949; SaCas9
ggcggaaggggatccctt

SEQ ID NO: 49445 - DNA, 25 bp, Artificial Sequence
  Synthetic: FXN 5 reverse 9:69036936-69036967; SaCas9
acatgcggcgtaccagccactctga

SEQ ID NO: 49446 - DNA, 24 bp, Artificial Sequence
  Synthetic: FXN 5 reverse 9:69036937-69036967; SaCas9
catgcggcgtaccagccactctga

SEQ ID NO: 49447 - DNA, 23 bp, Artificial Sequence
  Synthetic: FXN 5 reverse 9:69036938-69036967; SaCas9
atgcggcgtaccagccactctga

SEQ ID NO: 49448 - DNA, 22 bp, Artificial Sequence
  Synthetic: FXN 5 reverse 9:69036939-69036967; SaCas9
tgcggcgtaccagccactctga

SEQ ID NO: 49449 - DNA, 21 bp, Artificial Sequence
  Synthetic: FXN 5 reverse 9:69036940-69036967; SaCas9
gcggcgtaccagccactctga

SEQ ID NO: 49450 - DNA, 20 bp, Artificial Sequence
  Synthetic: FXN 5 reverse 9:69036941-69036967; SaCas9
cggcgtaccagccactctga

SEQ ID NO: 49451 - DNA, 19 bp, Artificial Sequence
  Synthetic: FXN 5 reverse 9:69036942-69036967; SaCas9
ggcgtaccagccactctga

SEQ ID NO: 49452 - DNA, 18 bp, Artificial Sequence
  Synthetic: FXN 5 reverse 9:69036943-69036967; SaCas9
gcgtaccagccactctga

SEQ ID NO: 49453 - DNA, 25 bp, Artificial Sequence
  Synthetic: FXN 5 reverse 9:69036937-69036968; SaCas9
tacatgcggcgtaccagccactctg

SEQ ID NO: 49454 - DNA, 24 bp, Artificial Sequence
  Synthetic: FXN 5 reverse 9:69036938-69036968; SaCas9
acatgcggcgtaccagccactctg

SEQ ID NO: 49455 - DNA, 23 bp, Artificial Sequence
  Synthetic: FXN 5 reverse 9:69036939-69036968; SaCas9
catgcggcgtaccagccactctg

SEQ ID NO: 49456 - DNA, 22 bp, Artificial Sequence
  Synthetic: FXN 5 reverse 9:69036940-69036968; SaCas9
atgcggcgtaccagccactctg

SEQ ID NO: 49457 - DNA, 21 bp, Artificial Sequence
  Synthetic: FXN 5 reverse 9:69036941-69036968; SaCas9
tgcggcgtaccagccactctg

SEQ ID NO: 49458 - DNA, 20 bp, Artificial Sequence
  Synthetic: FXN 5 reverse 9:69036942-69036968; SaCas9
gcggcgtaccagccactctg

SEQ ID NO: 49459 - DNA, 19 bp, Artificial Sequence
  Synthetic: FXN 5 reverse 9:69036943-69036968; SaCas9
cggcgtaccagccactctg

SEQ ID NO: 49460 - DNA, 18 bp, Artificial Sequence
  Synthetic: FXN 5 reverse 9:69036944-69036968; SaCas9
ggcgtaccagccactctg

SEQ ID NO: 49461 - DNA, 25 bp, Artificial Sequence
  Synthetic: FXN 5 reverse 9:69036940-69036971; SaCas9
taatacatgcggcgtaccagccact

SEQ ID NO: 49462 - DNA, 24 bp, Artificial Sequence
  Synthetic: FXN 5 reverse 9:69036941-69036971; SaCas9
aatacatgcggcgtaccagccact

SEQ ID NO: 49463 - DNA, 23 bp, Artificial Sequence
  Synthetic: FXN 5 reverse 9:69036942-69036971; SaCas9
atacatgcggcgtaccagccact

SEQ ID NO: 49464 - DNA, 22 bp, Artificial Sequence
  Synthetic: FXN 5 reverse 9:69036943-69036971; SaCas9
tacatgcggcgtaccagccact

SEQ ID NO: 49465 - DNA, 21 bp, Artificial Sequence
  Synthetic: FXN 5 reverse 9:69036944-69036971; SaCas9
acatgcggcgtaccagccact

SEQ ID NO: 49466 - DNA, 20 bp, Artificial Sequence
  Synthetic: FXN 5 reverse 9:69036945-69036971; SaCas9
catgcggcgtaccagccact

SEQ ID NO: 49467 - DNA, 19 bp, Artificial Sequence
  Synthetic: FXN 5 reverse 9:69036946-69036971; SaCas9
atgcggcgtaccagccact

SEQ ID NO: 49468 - DNA, 18 bp, Artificial Sequence
  Synthetic: FXN 5 reverse 9:69036947-69036971; SaCas9
tgcggcgtaccagccact

SEQ ID NO: 49469 - DNA, 25 bp, Artificial Sequence
  Synthetic: FXN 5 forward 9:69036944-69036975; SaCas9
agagtggctggtacgccgcatgtat

SEQ ID NO: 49470 - DNA, 24 bp, Artificial Sequence
  Synthetic: FXN 5 forward 9:69036945-69036975; SaCas9
gagtggctggtacgccgcatgtat

SEQ ID NO: 49471 - DNA, 23 bp, Artificial Sequence
  Synthetic: FXN 5 forward 9:69036946-69036975; SaCas9
agtggctggtacgccgcatgtat

SEQ ID NO: 49472 - DNA, 22 bp, Artificial Sequence
  Synthetic: FXN 5 forward 9:69036947-69036975; SaCas9
gtggctggtacgccgcatgtat

SEQ ID NO: 49473 - DNA, 21 bp, Artificial Sequence
  Synthetic: FXN 5 forward 9:69036948-69036975; SaCas9
tggctggtacgccgcatgtat

SEQ ID NO: 49474 - DNA, 20 bp, Artificial Sequence
  Synthetic: FXN 5 forward 9:69036949-69036975; SaCas9
ggctggtacgccgcatgtat

SEQ ID NO: 49475 - DNA, 19 bp, Artificial Sequence
  Synthetic: FXN 5 forward 9:69036950-69036975; SaCas9
gctggtacgccgcatgtat

SEQ ID NO: 49476 - DNA, 18 bp, Artificial Sequence
  Synthetic: FXN 5 forward 9:69036951-69036975; SaCas9
ctggtacgccgcatgtat

SEQ ID NO: 49477 - DNA, 25 bp, Artificial Sequence
  Synthetic: FXN 5 forward 9:69036945-69036976; SaCas9
gagtggctggtacgccgcatgtatt

SEQ ID NO: 49478 - DNA, 24 bp, Artificial Sequence
  Synthetic: FXN 5 forward 9:69036946-69036976; SaCas9
agtggctggtacgccgcatgtatt

SEQ ID NO: 49479 - DNA, 23 bp, Artificial Sequence
  Synthetic: FXN 5 forward 9:69036947-69036976; SaCas9
gtggctggtacgccgcatgtatt

SEQ ID NO: 49480 - DNA, 22 bp, Artificial Sequence
  Synthetic: FXN 5 forward 9:69036948-69036976; SaCas9
tggctggtacgccgcatgtatt

SEQ ID NO: 49481 - DNA, 21 bp, Artificial Sequence
  Synthetic: FXN 5 forward 9:69036949-69036976; SaCas9
ggctggtacgccgcatgtatt

SEQ ID NO: 49482 - DNA, 20 bp, Artificial Sequence
  Synthetic: FXN 5 forward 9:69036950-69036976; SaCas9
gctggtacgccgcatgtatt

SEQ ID NO: 49483 - DNA, 19 bp, Artificial Sequence
  Synthetic: FXN 5 forward 9:69036951-69036976; SaCas9
ctggtacgccgcatgtatt

SEQ ID NO: 49484 - DNA, 18 bp, Artificial Sequence
  Synthetic: FXN 5 forward 9:69036952-69036976; SaCas9
tggtacgccgcatgtatt

SEQ ID NO: 49485 - DNA, 25 bp, Artificial Sequence
  Synthetic: FXN 5 forward 9:69036946-69036977; SaCas9
agtggctggtacgccgcatgtatta

SEQ ID NO: 49486 - DNA, 24 bp, Artificial Sequence
  Synthetic: FXN 5 forward 9:69036947-69036977; SaCas9
gtggctggtacgccgcatgtatta

SEQ ID NO: 49487 - DNA, 23 bp, Artificial Sequence
  Synthetic: FXN 5 forward 9:69036948-69036977; SaCas9
tggctggtacgccgcatgtatta

SEQ ID NO: 49488 - DNA, 22 bp, Artificial Sequence
  Synthetic: FXN 5 forward 9:69036949-69036977; SaCas9
ggctggtacgccgcatgtatta

SEQ ID NO: 49489 - DNA, 21 bp, Artificial Sequence
  Synthetic: FXN 5 forward 9:69036950-69036977; SaCas9
gctggtacgccgcatgtatta

SEQ ID NO: 49490 - DNA, 20 bp, Artificial Sequence
  Synthetic: FXN 5 forward 9:69036951-69036977; SaCas9
ctggtacgccgcatgtatta

SEQ ID NO: 49491 - DNA, 19 bp, Artificial Sequence
  Synthetic: FXN 5 forward 9:69036952-69036977; SaCas9
tggtacgccgcatgtatta

SEQ ID NO: 49492 - DNA, 18 bp, Artificial Sequence
  Synthetic: FXN 5 forward 9:69036953-69036977; SaCas9
ggtacgccgcatgtatta

SEQ ID NO: 49493 - DNA, 25 bp, Artificial Sequence
  Synthetic: FXN 5 forward 9:69036947-69036978; SaCas9
gtggctggtacgccgcatgtattag

SEQ ID NO: 49494 - DNA, 24 bp, Artificial Sequence
  Synthetic: FXN 5 forward 9:69036948-69036978; SaCas9
tggctggtacgccgcatgtattag

SEQ ID NO: 49495 - DNA, 23 bp, Artificial Sequence
  Synthetic: FXN 5 forward 9:69036949-69036978; SaCas9
ggctggtacgccgcatgtattag

SEQ ID NO: 49496 - DNA, 22 bp, Artificial Sequence
  Synthetic: FXN 5 forward 9:69036950-69036978; SaCas9
gctggtacgccgcatgtattag

SEQ ID NO: 49497 - DNA, 21 bp, Artificial Sequence
  Synthetic: FXN 5 forward 9:69036951-69036978; SaCas9
ctggtacgccgcatgtattag

SEQ ID NO: 49498 - DNA, 20 bp, Artificial Sequence
  Synthetic: FXN 5 forward 9:69036952-69036978; SaCas9
tggtacgccgcatgtattag

SEQ ID NO: 49499 - DNA, 19 bp, Artificial Sequence
  Synthetic: FXN 5 forward 9:69036953-69036978; SaCas9
ggtacgccgcatgtattag

SEQ ID NO: 49500 - DNA, 18 bp, Artificial Sequence
  Synthetic: FXN 5 forward 9:69036954-69036978; SaCas9
gtacgccgcatgtattag

SEQ ID NO: 49501 - DNA, 25 bp, Artificial Sequence
  Synthetic: FXN 5 forward 9:69036952-69036983; SaCas9
tggtacgccgcatgtattaggggag

SEQ ID NO: 49502 - DNA, 24 bp, Artificial Sequence
  Synthetic: FXN 5 forward 9:69036953-69036983; SaCas9
ggtacgccgcatgtattaggggag

SEQ ID NO: 49503 - DNA, 23 bp, Artificial Sequence
  Synthetic: FXN 5 forward 9:69036954-69036983; SaCas9
gtacgccgcatgtattaggggag

SEQ ID NO: 49504 - DNA, 22 bp, Artificial Sequence
  Synthetic: FXN 5 forward 9:69036955-69036983; SaCas9
tacgccgcatgtattaggggag

SEQ ID NO: 49505 - DNA, 21 bp, Artificial Sequence
  Synthetic: FXN 5 forward 9:69036956-69036983; SaCas9
acgccgcatgtattaggggag

SEQ ID NO: 49506 - DNA, 20 bp, Artificial Sequence
  Synthetic: FXN 5 forward 9:69036957-69036983; SaCas9
cgccgcatgtattaggggag

SEQ ID NO: 49507 - DNA, 19 bp, Artificial Sequence
  Synthetic: FXN 5 forward 9:69036958-69036983; SaCas9
gccgcatgtattaggggag

SEQ ID NO: 49508 - DNA, 18 bp, Artificial Sequence
  Synthetic: FXN 5 forward 9:69036959-69036983; SaCas9
ccgcatgtattaggggag

SEQ ID NO: 49509 - DNA, 25 bp, Artificial Sequence
  Synthetic: FXN 5 forward 9:69036956-69036987; SaCas9
acgccgcatgtattaggggagatga

SEQ ID NO: 49510 - DNA, 24 bp, Artificial Sequence
  Synthetic: FXN 5 forward 9:69036957-69036987; SaCas9
cgccgcatgtattaggggagatga

SEQ ID NO: 49511 - DNA, 23 bp, Artificial Sequence
  Synthetic: FXN 5 forward 9:69036958-69036987; SaCas9
gccgcatgtattaggggagatga

SEQ ID NO: 49512 - DNA, 22 bp, Artificial Sequence
  Synthetic: FXN 5 forward 9:69036959-69036987; SaCas9
ccgcatgtattaggggagatga

SEQ ID NO: 49513 - DNA, 21 bp, Artificial Sequence
  Synthetic: FXN 5 forward 9:69036960-69036987; SaCas9
cgcatgtattaggggagatga

SEQ ID NO: 49514 - DNA, 20 bp, Artificial Sequence
  Synthetic: FXN 5 forward 9:69036961-69036987; SaCas9
gcatgtattaggggagatga

SEQ ID NO: 49515 - DNA, 19 bp, Artificial Sequence
  Synthetic: FXN 5 forward 9:69036962-69036987; SaCas9
catgtattaggggagatga

SEQ ID NO: 49516 - DNA, 18 bp, Artificial Sequence
  Synthetic: FXN 5 forward 9:69036963-69036987; SaCas9
atgtattaggggagatga

SEQ ID NO: 49517 - DNA, 25 bp, Artificial Sequence
  Synthetic: FXN 5 forward 9:69036995-69037026; SaCas9
gtccaagccatatttgtgttgctct

SEQ ID NO: 49518 - DNA, 24 bp, Artificial Sequence
  Synthetic: FXN 5 forward 9:69036996-69037026; SaCas9
tccaagccatatttgtgttgctct

SEQ ID NO: 49519 - DNA, 23 bp, Artificial Sequence
  Synthetic: FXN 5 forward 9:69036997-69037026; SaCas9
ccaagccatatttgtgttgctct

SEQ ID NO: 49520 - DNA, 22 bp, Artificial Sequence
  Synthetic: FXN 5 forward 9:69036998-69037026; SaCas9
caagccatatttgtgttgctct

SEQ ID NO: 49521 - DNA, 21 bp, Artificial Sequence
  Synthetic: FXN 5 forward 9:69036999-69037026; SaCas9
aagccatatttgtgttgctct

SEQ ID NO: 49522 - DNA, 20 bp, Artificial Sequence
  Synthetic: FXN 5 forward 9:69037000-69037026; SaCas9
agccatatttgtgttgctct

SEQ ID NO: 49523 - DNA, 19 bp, Artificial Sequence
  Synthetic: FXN 5 forward 9:69037001-69037026; SaCas9
gccatatttgtgttgctct

SEQ ID NO: 49524 - DNA, 18 bp, Artificial Sequence
  Synthetic: FXN 5 forward 9:69037002-69037026; SaCas9
ccatatttgtgttgctct

SEQ ID NO: 49525 - DNA, 25 bp, Artificial Sequence
  Synthetic: FXN 5 reverse 9:69036995-69037026; SaCas9
ctccggagagcaacacaaatatggc

SEQ ID NO: 49526 - DNA, 24 bp, Artificial Sequence
  Synthetic: FXN 5 reverse 9:69036996-69037026; SaCas9
tccggagagcaacacaaatatggc

SEQ ID NO: 49527 - DNA, 23 bp, Artificial Sequence
  Synthetic: FXN 5 reverse 9:69036997-69037026; SaCas9
ccggagagcaacacaaatatggc

SEQ ID NO: 49528 - DNA, 22 bp, Artificial Sequence
  Synthetic: FXN 5 reverse 9:69036998-69037026; SaCas9
cggagagcaacacaaatatggc

SEQ ID NO: 49529 - DNA, 21 bp, Artificial Sequence
  Synthetic: FXN 5 reverse 9:69036999-69037026; SaCas9
ggagagcaacacaaatatggc

SEQ ID NO: 49530 - DNA, 20 bp, Artificial Sequence
  Synthetic: FXN 5 reverse 9:69037000-69037026; SaCas9
gagagcaacacaaatatggc

SEQ ID NO: 49531 - DNA, 19 bp, Artificial Sequence
  Synthetic: FXN 5 reverse 9:69037001-69037026; SaCas9
agagcaacacaaatatggc

SEQ ID NO: 49532 - DNA, 18 bp, Artificial Sequence
  Synthetic: FXN 5 reverse 9:69037002-69037026; SaCas9
gagcaacacaaatatggc

SEQ ID NO: 49533 - DNA, 25 bp, Artificial Sequence
  Synthetic: FXN 5 forward 9:69036996-69037027; SaCas9
tccaagccatatttgtgttgctctc

SEQ ID NO: 49534 - DNA, 24 bp, Artificial Sequence
  Synthetic: FXN 5 forward 9:69036997-69037027; SaCas9
ccaagccatatttgtgttgctctc

SEQ ID NO: 49535 - DNA, 23 bp, Artificial Sequence
  Synthetic: FXN 5 forward 9:69036998-69037027; SaCas9
caagccatatttgtgttgctctc

SEQ ID NO: 49536 - DNA, 22 bp, Artificial Sequence
  Synthetic: FXN 5 forward 9:69036999-69037027; SaCas9
aagccatatttgtgttgctctc

SEQ ID NO: 49537 - DNA, 21 bp, Artificial Sequence
  Synthetic: FXN 5 forward 9:69037000-69037027; SaCas9
agccatatttgtgttgctctc

SEQ ID NO: 49538 - DNA, 20 bp, Artificial Sequence
  Synthetic: FXN 5 forward 9:69037001-69037027; SaCas9
gccatatttgtgttgctctc

SEQ ID NO: 49539 - DNA, 19 bp, Artificial Sequence
  Synthetic: FXN 5 forward 9:69037002-69037027; SaCas9
ccatatttgtgttgctctc

SEQ ID NO: 49540 - DNA, 18 bp, Artificial Sequence
  Synthetic: FXN 5 forward 9:69037003-69037027; SaCas9
catatttgtgttgctctc

SEQ ID NO: 49541 - DNA, 25 bp, Artificial Sequence
  Synthetic: FXN 5 forward 9:69037015-69037046; SaCas9
gctctccggagtttgtactttaggc

SEQ ID NO: 49542 - DNA, 24 bp, Artificial Sequence
  Synthetic: FXN 5 forward 9:69037016-69037046; SaCas9
ctctccggagtttgtactttaggc

SEQ ID NO: 49543 - DNA, 23 bp, Artificial Sequence
  Synthetic: FXN 5 forward 9:69037017-69037046; SaCas9
tctccggagtttgtactttaggc

SEQ ID NO: 49544 - DNA, 22 bp, Artificial Sequence
  Synthetic: FXN 5 forward 9:69037018-69037046; SaCas9
ctccggagtttgtactttaggc

SEQ ID NO: 49545 - DNA, 21 bp, Artificial Sequence
  Synthetic: FXN 5 forward 9:69037019-69037046; SaCas9
tccggagtttgtactttaggc

SEQ ID NO: 49546 - DNA, 20 bp, Artificial Sequence
  Synthetic: FXN 5 forward 9:69037020-69037046; SaCas9
ccggagtttgtactttaggc

SEQ ID NO: 49547 - DNA, 19 bp, Artificial Sequence
  Synthetic: FXN 5 forward 9:69037021-69037046; SaCas9
cggagtttgtactttaggc

SEQ ID NO: 49548 - DNA, 18 bp, Artificial Sequence
  Synthetic: FXN 5 forward 9:69037022-69037046; SaCas9
ggagtttgtactttaggc

SEQ ID NO: 49549 - DNA, 25 bp, Artificial Sequence
  Synthetic: FXN 5 reverse 9:69037015-69037046; SaCas9
gttcaagcctaaagtacaaactccg

SEQ ID NO: 49550 - DNA, 24 bp, Artificial Sequence
  Synthetic: FXN 5 reverse 9:69037016-69037046; SaCas9
ttcaagcctaaagtacaaactccg

SEQ ID NO: 49551 - DNA, 23 bp, Artificial Sequence
  Synthetic: FXN 5 reverse 9:69037017-69037046; SaCas9
tcaagcctaaagtacaaactccg

SEQ ID NO: 49552 - DNA, 22 bp, Artificial Sequence
  Synthetic: FXN 5 reverse 9:69037018-69037046; SaCas9
caagcctaaagtacaaactccg

SEQ ID NO: 49553 - DNA, 21 bp, Artificial Sequence
  Synthetic: FXN 5 reverse 9:69037019-69037046; SaCas9
aagcctaaagtacaaactccg

SEQ ID NO: 49554 - DNA, 20 bp, Artificial Sequence
  Synthetic: FXN 5 reverse 9:69037020-69037046; SaCas9
agcctaaagtacaaactccg

SEQ ID NO: 49555 - DNA, 19 bp, Artificial Sequence
  Synthetic: FXN 5 reverse 9:69037021-69037046; SaCas9
gcctaaagtacaaactccg

SEQ ID NO: 49556 - DNA, 18 bp, Artificial Sequence
  Synthetic: FXN 5 reverse 9:69037022-69037046; SaCas9
cctaaagtacaaactccg

SEQ ID NO: 49557 - DNA, 25 bp, Artificial Sequence
  Synthetic: FXN 5 reverse 9:69037017-69037048; SaCas9
aagttcaagcctaaagtacaaactc

SEQ ID NO: 49558 - DNA, 24 bp, Artificial Sequence
  Synthetic: FXN 5 reverse 9:69037018-69037048; SaCas9
agttcaagcctaaagtacaaactc

SEQ ID NO: 49559 - DNA, 23 bp, Artificial Sequence
  Synthetic: FXN 5 reverse 9:69037019-69037048; SaCas9
gttcaagcctaaagtacaaactc

SEQ ID NO: 49560 - DNA, 22 bp, Artificial Sequence
  Synthetic: FXN 5 reverse 9:69037020-69037048; SaCas9
ttcaagcctaaagtacaaactc

SEQ ID NO: 49561 - DNA, 21 bp, Artificial Sequence
  Synthetic: FXN 5 reverse 9:69037021-69037048; SaCas9
tcaagcctaaagtacaaactc

SEQ ID NO: 49562 - DNA, 20 bp, Artificial Sequence
  Synthetic: FXN 5 reverse 9:69037022-69037048; SaCas9
caagcctaaagtacaaactc

SEQ ID NO: 49563 - DNA, 19 bp, Artificial Sequence
  Synthetic: FXN 5 reverse 9:69037023-69037048; SaCas9
aagcctaaagtacaaactc

SEQ ID NO: 49564 - DNA, 18 bp, Artificial Sequence
  Synthetic: FXN 5 reverse 9:69037024-69037048; SaCas9
agcctaaagtacaaactc

SEQ ID NO: 49565 - DNA, 25 bp, Artificial Sequence
  Synthetic: FXN 5 reverse 9:69037018-69037049; SaCas9
gaagttcaagcctaaagtacaaact

SEQ ID NO: 49566 - DNA, 24 bp, Artificial Sequence
  Synthetic: FXN 5 reverse 9:69037019-69037049; SaCas9
aagttcaagcctaaagtacaaact

SEQ ID NO: 49567 - DNA, 23 bp, Artificial Sequence
  Synthetic: FXN 5 reverse 9:69037020-69037049; SaCas9
agttcaagcctaaagtacaaact

SEQ ID NO: 49568 - DNA, 22 bp, Artificial Sequence
  Synthetic: FXN 5 reverse 9:69037021-69037049; SaCas9
gttcaagcctaaagtacaaact

SEQ ID NO: 49569 - DNA, 21 bp, Artificial Sequence
  Synthetic: FXN 5 reverse 9:69037022-69037049; SaCas9
ttcaagcctaaagtacaaact

SEQ ID NO: 49570 - DNA, 20 bp, Artificial Sequence
  Synthetic: FXN 5 reverse 9:69037023-69037049; SaCas9
tcaagcctaaagtacaaact

SEQ ID NO: 49571 - DNA, 19 bp, Artificial Sequence
  Synthetic: FXN 5 reverse 9:69037024-69037049; SaCas9
caagcctaaagtacaaact

SEQ ID NO: 49572 - DNA, 18 bp, Artificial Sequence
  Synthetic: FXN 5 reverse 9:69037025-69037049; SaCas9
aagcctaaagtacaaact

SEQ ID NO: 49573 - DNA, 25 bp, Artificial Sequence
  Synthetic: FXN 5 reverse 9:69037045-69037076; SaCas9
acaatgtgggccaaataacacgtgt

SEQ ID NO: 49574 - DNA, 24 bp, Artificial Sequence
  Synthetic: FXN 5 reverse 9:69037046-69037076; SaCas9
caatgtgggccaaataacacgtgt

SEQ ID NO: 49575 - DNA, 23 bp, Artificial Sequence
  Synthetic: FXN 5 reverse 9:69037047-69037076; SaCas9
aatgtgggccaaataacacgtgt

SEQ ID NO: 49576 - DNA, 22 bp, Artificial Sequence
  Synthetic: FXN 5 reverse 9:69037048-69037076; SaCas9
atgtgggccaaataacacgtgt

SEQ ID NO: 49577 - DNA, 21 bp, Artificial Sequence
  Synthetic: FXN 5 reverse 9:69037049-69037076; SaCas9
tgtgggccaaataacacgtgt

SEQ ID NO: 49578 - DNA, 20 bp, Artificial Sequence
  Synthetic: FXN 5 reverse 9:69037050-69037076; SaCas9
gtgggccaaataacacgtgt

SEQ ID NO: 49579 - DNA, 19 bp, Artificial Sequence
  Synthetic: FXN 5 reverse 9:69037051-69037076; SaCas9
tgggccaaataacacgtgt

SEQ ID NO: 49580 - DNA, 18 bp, Artificial Sequence
  Synthetic: FXN 5 reverse 9:69037052-69037076; SaCas9
gggccaaataacacgtgt

SEQ ID NO: 49581 - DNA, 25 bp, Artificial Sequence
  Synthetic: FXN 5 reverse 9:69037046-69037077; SaCas9
cacaatgtgggccaaataacacgtg

SEQ ID NO: 49582 - DNA, 24 bp, Artificial Sequence
  Synthetic: FXN 5 reverse 9:69037047-69037077; SaCas9
acaatgtgggccaaataacacgtg

SEQ ID NO: 49583 - DNA, 23 bp, Artificial Sequence
  Synthetic: FXN 5 reverse 9:69037048-69037077; SaCas9
caatgtgggccaaataacacgtg

SEQ ID NO: 49584 - DNA, 22 bp, Artificial Sequence
  Synthetic: FXN 5 reverse 9:69037049-69037077; SaCas9
aatgtgggccaaataacacgtg

SEQ ID NO: 49585 - DNA, 21 bp, Artificial Sequence
  Synthetic: FXN 5 reverse 9:69037050-69037077; SaCas9
atgtgggccaaataacacgtg

SEQ ID NO: 49586 - DNA, 20 bp, Artificial Sequence
  Synthetic: FXN 5 reverse 9:69037051-69037077; SaCas9
tgtgggccaaataacacgtg

SEQ ID NO: 49587 - DNA, 19 bp, Artificial Sequence
  Synthetic: FXN 5 reverse 9:69037052-69037077; SaCas9
gtgggccaaataacacgtg

SEQ ID NO: 49588 - DNA, 18 bp, Artificial Sequence
  Synthetic: FXN 5 reverse 9:69037053-69037077; SaCas9
tgggccaaataacacgtg

SEQ ID NO: 49589 - DNA, 25 bp, Artificial Sequence
  Synthetic: FXN 5 reverse 9:69037047-69037078; SaCas9
acacaatgtgggccaaataacacgt

SEQ ID NO: 49590 - DNA, 24 bp, Artificial Sequence
  Synthetic: FXN 5 reverse 9:69037048-69037078; SaCas9
cacaatgtgggccaaataacacgt

SEQ ID NO: 49591 - DNA, 23 bp, Artificial Sequence
  Synthetic: FXN 5 reverse 9:69037049-69037078; SaCas9
acaatgtgggccaaataacacgt

SEQ ID NO: 49592 - DNA, 22 bp, Artificial Sequence
  Synthetic: FXN 5 reverse 9:69037050-69037078; SaCas9
caatgtgggccaaataacacgt

SEQ ID NO: 49593 - DNA, 21 bp, Artificial Sequence
  Synthetic: FXN 5 reverse 9:69037051-69037078; SaCas9
aatgtgggccaaataacacgt

SEQ ID NO: 49594 - DNA, 20 bp, Artificial Sequence
  Synthetic: FXN 5 reverse 9:69037052-69037078; SaCas9
atgtgggccaaataacacgt

SEQ ID NO: 49595 - DNA, 19 bp, Artificial Sequence
  Synthetic: FXN 5 reverse 9:69037053-69037078; SaCas9
tgtgggccaaataacacgt

SEQ ID NO: 49596 - DNA, 18 bp, Artificial Sequence
  Synthetic: FXN 5 reverse 9:69037054-69037078; SaCas9
gtgggccaaataacacgt

SEQ ID NO: 49597 - DNA, 25 bp, Artificial Sequence
  Synthetic: FXN 5 forward 9:69037053-69037084; SaCas9
acgtgttatttggcccacattgtgt

SEQ ID NO: 49598 - DNA, 24 bp, Artificial Sequence
  Synthetic: FXN 5 forward 9:69037054-69037084; SaCas9
cgtgttatttggcccacattgtgt

SEQ ID NO: 49599 - DNA, 23 bp, Artificial Sequence
  Synthetic: FXN 5 forward 9:69037055-69037084; SaCas9
gtgttatttggcccacattgtgt

SEQ ID NO: 49600 - DNA, 22 bp, Artificial Sequence
  Synthetic: FXN 5 forward 9:69037056-69037084; SaCas9
tgttatttggcccacattgtgt

SEQ ID NO: 49601 - DNA, 21 bp, Artificial Sequence
  Synthetic: FXN 5 forward 9:69037057-69037084; SaCas9
gttatttggcccacattgtgt

SEQ ID NO: 49602 - DNA, 20 bp, Artificial Sequence
  Synthetic: FXN 5 forward 9:69037058-69037084; SaCas9
ttatttggcccacattgtgt

SEQ ID NO: 49603 - DNA, 19 bp, Artificial Sequence
  Synthetic: FXN 5 forward 9:69037059-69037084; SaCas9
tatttggcccacattgtgt

SEQ ID NO: 49604 - DNA, 18 bp, Artificial Sequence
  Synthetic: FXN 5 forward 9:69037060-69037084; SaCas9
atttggcccacattgtgt

SEQ ID NO: 49605 - DNA, 25 bp, Artificial Sequence
  Synthetic: FXN 5 forward 9:69037056-69037087; SaCas9
tgttatttggcccacattgtgtttg

SEQ ID NO: 49606 - DNA, 24 bp, Artificial Sequence
  Synthetic: FXN 5 forward 9:69037057-69037087; SaCas9
gttatttggcccacattgtgtttg

SEQ ID NO: 49607 - DNA, 23 bp, Artificial Sequence
  Synthetic: FXN 5 forward 9:69037058-69037087; SaCas9
ttatttggcccacattgtgtttg

SEQ ID NO: 49608 - DNA, 22 bp, Artificial Sequence
  Synthetic: FXN 5 forward 9:69037059-69037087; SaCas9
tatttggcccacattgtgtttg

SEQ ID NO: 49609 - DNA, 21 bp, Artificial Sequence
  Synthetic: FXN 5 forward 9:69037060-69037087; SaCas9
atttggcccacattgtgtttg

SEQ ID NO: 49610 - DNA, 20 bp, Artificial Sequence
  Synthetic: FXN 5 forward 9:69037061-69037087; SaCas9
tttggcccacattgtgtttg

SEQ ID NO: 49611 - DNA, 19 bp, Artificial Sequence
  Synthetic: FXN 5 forward 9:69037062-69037087; SaCas9
ttggcccacattgtgtttg

SEQ ID NO: 49612 - DNA, 18 bp, Artificial Sequence
  Synthetic: FXN 5 forward 9:69037063-69037087; SaCas9
tggcccacattgtgtttg

SEQ ID NO: 49613 - DNA, 25 bp, Artificial Sequence
  Synthetic: FXN 5 forward 9:69037064-69037095; SaCas9
ggcccacattgtgtttgaagaaact

SEQ ID NO: 49614 - DNA, 24 bp, Artificial Sequence
  Synthetic: FXN 5 forward 9:69037065-69037095; SaCas9
gcccacattgtgtttgaagaaact

SEQ ID NO: 49615 - DNA, 23 bp, Artificial Sequence
  Synthetic: FXN 5 forward 9:69037066-69037095; SaCas9
cccacattgtgtttgaagaaact

SEQ ID NO: 49616 - DNA, 22 bp, Artificial Sequence
  Synthetic: FXN 5 forward 9:69037067-69037095; SaCas9
ccacattgtgtttgaagaaact

SEQ ID NO: 49617 - DNA, 21 bp, Artificial Sequence
  Synthetic: FXN 5 forward 9:69037068-69037095; SaCas9
cacattgtgtttgaagaaact

SEQ ID NO: 49618 - DNA, 20 bp, Artificial Sequence
  Synthetic: FXN 5 forward 9:69037069-69037095; SaCas9
acattgtgtttgaagaaact

SEQ ID NO: 49619 - DNA, 19 bp, Artificial Sequence
  Synthetic: FXN 5 forward 9:69037070-69037095; SaCas9
cattgtgtttgaagaaact

SEQ ID NO: 49620 - DNA, 18 bp, Artificial Sequence
  Synthetic: FXN 5 forward 9:69037071-69037095; SaCas9
attgtgtttgaagaaact

SEQ ID NO: 49621 - DNA, 25 bp, Artificial Sequence
  Synthetic: FXN 5 forward 9:69037065-69037096; SaCas9
gcccacattgtgtttgaagaaactt

SEQ ID NO: 49622 - DNA, 24 bp, Artificial Sequence
  Synthetic: FXN 5 forward 9:69037066-69037096; SaCas9
cccacattgtgtttgaagaaactt

SEQ ID NO: 49623 - DNA, 23 bp, Artificial Sequence
  Synthetic: FXN 5 forward 9:69037067-69037096; SaCas9
ccacattgtgtttgaagaaactt

SEQ ID NO: 49624 - DNA, 22 bp, Artificial Sequence
  Synthetic: FXN 5 forward 9:69037068-69037096; SaCas9
cacattgtgtttgaagaaactt

SEQ ID NO: 49625 - DNA, 21 bp, Artificial Sequence
  Synthetic: FXN 5 forward 9:69037069-69037096; SaCas9
acattgtgtttgaagaaactt

SEQ ID NO: 49626 - DNA, 20 bp, Artificial Sequence
  Synthetic: FXN 5 forward 9:69037070-69037096; SaCas9
cattgtgtttgaagaaactt

SEQ ID NO: 49627 - DNA, 19 bp, Artificial Sequence
  Synthetic: FXN 5 forward 9:69037071-69037096; SaCas9
attgtgtttgaagaaactt

SEQ ID NO: 49628 - DNA, 18 bp, Artificial Sequence
  Synthetic: FXN 5 forward 9:69037072-69037096; SaCas9
ttgtgtttgaagaaactt

SEQ ID NO: 49629 - DNA, 25 bp, Artificial Sequence
  Synthetic: FXN 5 reverse 9:69037065-69037096; SaCas9
atcccaaagtttcttcaaacacaat

SEQ ID NO: 49630 - DNA, 24 bp, Artificial Sequence
  Synthetic: FXN 5 reverse 9:69037066-69037096; SaCas9
tcccaaagtttcttcaaacacaat

SEQ ID NO: 49631 - DNA, 23 bp, Artificial Sequence
  Synthetic: FXN 5 reverse 9:69037067-69037096; SaCas9
cccaaagtttcttcaaacacaat

SEQ ID NO: 49632 - DNA, 22 bp, Artificial Sequence
  Synthetic: FXN 5 reverse 9:69037068-69037096; SaCas9
ccaaagtttcttcaaacacaat

SEQ ID NO: 49633 - DNA, 21 bp, Artificial Sequence
  Synthetic: FXN 5 reverse 9:69037069-69037096; SaCas9
caaagtttcttcaaacacaat

SEQ ID NO: 49634 - DNA, 20 bp, Artificial Sequence
  Synthetic: FXN 5 reverse 9:69037070-69037096; SaCas9
aaagtttcttcaaacacaat

SEQ ID NO: 49635 - DNA, 19 bp, Artificial Sequence
  Synthetic: FXN 5 reverse 9:69037071-69037096; SaCas9
aagtttcttcaaacacaat

SEQ ID NO: 49636 - DNA, 18 bp, Artificial Sequence
  Synthetic: FXN 5 reverse 9:69037072-69037096; SaCas9
agtttcttcaaacacaat

SEQ ID NO: 49637 - DNA, 25 bp, Artificial Sequence
  Synthetic: FXN 5 forward 9:69037092-69037123; SaCas9
ggattggttgccagtgcttaaaagt

SEQ ID NO: 49638 - DNA, 24 bp, Artificial Sequence
  Synthetic: FXN 5 forward 9:69037093-69037123; SaCas9
gattggttgccagtgcttaaaagt

SEQ ID NO: 49639 - DNA, 23 bp, Artificial Sequence
  Synthetic: FXN 5 forward 9:69037094-69037123; SaCas9
attggttgccagtgcttaaaagt

SEQ ID NO: 49640 - DNA, 22 bp, Artificial Sequence
  Synthetic: FXN 5 forward 9:69037095-69037123; SaCas9
ttggttgccagtgcttaaaagt

SEQ ID NO: 49641 - DNA, 21 bp, Artificial Sequence
  Synthetic: FXN 5 forward 9:69037096-69037123; SaCas9
tggttgccagtgcttaaaagt

SEQ ID NO: 49642 - DNA, 20 bp, Artificial Sequence
  Synthetic: FXN 5 forward 9:69037097-69037123; SaCas9
ggttgccagtgcttaaaagt

SEQ ID NO: 49643 - DNA, 19 bp, Artificial Sequence
  Synthetic: FXN 5 forward 9:69037098-69037123; SaCas9
gttgccagtgcttaaaagt

SEQ ID NO: 49644 - DNA, 18 bp, Artificial Sequence
  Synthetic: FXN 5 forward 9:69037099-69037123; SaCas9
ttgccagtgcttaaaagt

SEQ ID NO: 49645 - DNA, 25 bp, Artificial Sequence
  Synthetic: FXN 5 forward 9:69037099-69037130; SaCas9
ttgccagtgcttaaaagttaggact

SEQ ID NO: 49646 - DNA, 24 bp, Artificial Sequence
  Synthetic: FXN 5 forward 9:69037100-69037130; SaCas9
tgccagtgcttaaaagttaggact

SEQ ID NO: 49647 - DNA, 23 bp, Artificial Sequence
  Synthetic: FXN 5 forward 9:69037101-69037130; SaCas9
gccagtgcttaaaagttaggact

SEQ ID NO: 49648 - DNA, 22 bp, Artificial Sequence
  Synthetic: FXN 5 forward 9:69037102-69037130; SaCas9
ccagtgcttaaaagttaggact

SEQ ID NO: 49649 - DNA, 21 bp, Artificial Sequence
  Synthetic: FXN 5 forward 9:69037103-69037130; SaCas9
cagtgcttaaaagttaggact

SEQ ID NO: 49650 - DNA, 20 bp, Artificial Sequence
  Synthetic: FXN 5 forward 9:69037104-69037130; SaCas9
agtgcttaaaagttaggact

SEQ ID NO: 49651 - DNA, 19 bp, Artificial Sequence
  Synthetic: FXN 5 forward 9:69037105-69037130; SaCas9
gtgcttaaaagttaggact

SEQ ID NO: 49652 - DNA, 18 bp, Artificial Sequence
  Synthetic: FXN 5 forward 9:69037106-69037130; SaCas9
tgcttaaaagttaggact

SEQ ID NO: 49653 - DNA, 25 bp, Artificial Sequence
  Synthetic: FXN 5 forward 9:69037105-69037136; SaCas9
gtgcttaaaagttaggacttagaaa

SEQ ID NO: 49654 - DNA, 24 bp, Artificial Sequence
  Synthetic: FXN 5 forward 9:69037106-69037136; SaCas9
tgcttaaaagttaggacttagaaa

SEQ ID NO: 49655 - DNA, 23 bp, Artificial Sequence
  Synthetic: FXN 5 forward 9:69037107-69037136; SaCas9
gcttaaaagttaggacttagaaa

SEQ ID NO: 49656 - DNA, 22 bp, Artificial Sequence
  Synthetic: FXN 5 forward 9:69037108-69037136; SaCas9
cttaaaagttaggacttagaaa

SEQ ID NO: 49657 - DNA, 21 bp, Artificial Sequence
  Synthetic: FXN 5 forward 9:69037109-69037136; SaCas9
ttaaaagttaggacttagaaa

SEQ ID NO: 49658 - DNA, 20 bp, Artificial Sequence
  Synthetic: FXN 5 forward 9:69037110-69037136; SaCas9
taaaagttaggacttagaaa

SEQ ID NO: 49659 - DNA, 19 bp, Artificial Sequence
  Synthetic: FXN 5 forward 9:69037111-69037136; SaCas9
aaaagttaggacttagaaa

SEQ ID NO: 49660 - DNA, 18 bp, Artificial Sequence
  Synthetic: FXN 5 forward 9:69037112-69037136; SaCas9
aaagttaggacttagaaa

SEQ ID NO: 49661 - DNA, 25 bp, Artificial Sequence
  Synthetic: FXN 5 forward 9:69037118-69037149; SaCas9
aggacttagaaaatggatttcctgg

SEQ ID NO: 49662 - DNA, 24 bp, Artificial Sequence
  Synthetic: FXN 5 forward 9:69037119-69037149; SaCas9
ggacttagaaaatggatttcctgg

SEQ ID NO: 49663 - DNA, 23 bp, Artificial Sequence
  Synthetic: FXN 5 forward 9:69037120-69037149; SaCas9
gacttagaaaatggatttcctgg

SEQ ID NO: 49664 - DNA, 22 bp, Artificial Sequence
  Synthetic: FXN 5 forward 9:69037121-69037149; SaCas9
acttagaaaatggatttcctgg

SEQ ID NO: 49665 - DNA, 21 bp, Artificial Sequence
  Synthetic: FXN 5 forward 9:69037122-69037149; SaCas9
cttagaaaatggatttcctgg

SEQ ID NO: 49666 - DNA, 20 bp, Artificial Sequence
  Synthetic: FXN 5 forward 9:69037123-69037149; SaCas9
ttagaaaatggatttcctgg

SEQ ID NO: 49667 - DNA, 19 bp, Artificial Sequence
  Synthetic: FXN 5 forward 9:69037124-69037149; SaCas9
tagaaaatggatttcctgg

SEQ ID NO: 49668 - DNA, 18 bp, Artificial Sequence
  Synthetic: FXN 5 forward 9:69037125-69037149; SaCas9
agaaaatggatttcctgg

SEQ ID NO: 49669 - DNA, 25 bp, Artificial Sequence
  Synthetic: FXN 5 reverse 9:69037135-69037166; SaCas9
tgggcatgagccaccgcgtcctgcc

SEQ ID NO: 49670 - DNA, 24 bp, Artificial Sequence
  Synthetic: FXN 5 reverse 9:69037136-69037166; SaCas9
gggcatgagccaccgcgtcctgcc

SEQ ID NO: 49671 - DNA, 23 bp, Artificial Sequence
  Synthetic: FXN 5 reverse 9:69037137-69037166; SaCas9
ggcatgagccaccgcgtcctgcc

SEQ ID NO: 49672 - DNA, 22 bp, Artificial Sequence
  Synthetic: FXN 5 reverse 9:69037138-69037166; SaCas9
gcatgagccaccgcgtcctgcc

SEQ ID NO: 49673 - DNA, 21 bp, Artificial Sequence
  Synthetic: FXN 5 reverse 9:69037139-69037166; SaCas9
catgagccaccgcgtcctgcc

SEQ ID NO: 49674 - DNA, 20 bp, Artificial Sequence
  Synthetic: FXN 5 reverse 9:69037140-69037166; SaCas9
atgagccaccgcgtcctgcc

SEQ ID NO: 49675 - DNA, 19 bp, Artificial Sequence
  Synthetic: FXN 5 reverse 9:69037141-69037166; SaCas9
tgagccaccgcgtcctgcc

SEQ ID NO: 49676 - DNA, 18 bp, Artificial Sequence
  Synthetic: FXN 5 reverse 9:69037142-69037166; SaCas9
gagccaccgcgtcctgcc

SEQ ID NO: 49677 - DNA, 25 bp, Artificial Sequence
  Synthetic: FXN 5 reverse 9:69037136-69037167; SaCas9
atgggcatgagccaccgcgtcctgc

SEQ ID NO: 49678 - DNA, 24 bp, Artificial Sequence
  Synthetic: FXN 5 reverse 9:69037137-69037167; SaCas9
tgggcatgagccaccgcgtcctgc

SEQ ID NO: 49679 - DNA, 23 bp, Artificial Sequence
  Synthetic: FXN 5 reverse 9:69037138-69037167; SaCas9
gggcatgagccaccgcgtcctgc

SEQ ID NO: 49680 - DNA, 22 bp, Artificial Sequence
  Synthetic: FXN 5 reverse 9:69037139-69037167; SaCas9
ggcatgagccaccgcgtcctgc

SEQ ID NO: 49681 - DNA, 21 bp, Artificial Sequence
  Synthetic: FXN 5 reverse 9:69037140-69037167; SaCas9
gcatgagccaccgcgtcctgc

SEQ ID NO: 49682 - DNA, 20 bp, Artificial Sequence
  Synthetic: FXN 5 reverse 9:69037141-69037167; SaCas9
catgagccaccgcgtcctgc

SEQ ID NO: 49683 - DNA, 19 bp, Artificial Sequence
  Synthetic: FXN 5 reverse 9:69037142-69037167; SaCas9
atgagccaccgcgtcctgc

SEQ ID NO: 49684 - DNA, 18 bp, Artificial Sequence
  Synthetic: FXN 5 reverse 9:69037143-69037167; SaCas9
tgagccaccgcgtcctgc

SEQ ID NO: 49685 - DNA, 25 bp, Artificial Sequence
  Synthetic: FXN 5 forward 9:69037154-69037185; SaCas9
ggctcatgcccataatctcagcact

SEQ ID NO: 49686 - DNA, 24 bp, Artificial Sequence
  Synthetic: FXN 5 forward 9:69037155-69037185; SaCas9
gctcatgcccataatctcagcact

SEQ ID NO: 49687 - DNA, 23 bp, Artificial Sequence
  Synthetic: FXN 5 forward 9:69037156-69037185; SaCas9
ctcatgcccataatctcagcact

SEQ ID NO: 49688 - DNA, 22 bp, Artificial Sequence
  Synthetic: FXN 5 forward 9:69037157-69037185; SaCas9
tcatgcccataatctcagcact

SEQ ID NO: 49689 - DNA, 21 bp, Artificial Sequence
  Synthetic: FXN 5 forward 9:69037158-69037185; SaCas9
catgcccataatctcagcact

SEQ ID NO: 49690 - DNA, 20 bp, Artificial Sequence
  Synthetic: FXN 5 forward 9:69037159-69037185; SaCas9
atgcccataatctcagcact

SEQ ID NO: 49691 - DNA, 19 bp, Artificial Sequence
  Synthetic: FXN 5 forward 9:69037160-69037185; SaCas9
tgcccataatctcagcact

SEQ ID NO: 49692 - DNA, 18 bp, Artificial Sequence
  Synthetic: FXN 5 forward 9:69037161-69037185; SaCas9
gcccataatctcagcact

SEQ ID NO: 49693 - DNA, 25 bp, Artificial Sequence
  Synthetic: FXN 5 forward 9:69037155-69037186; SaCas9
gctcatgcccataatctcagcactt

SEQ ID NO: 49694 - DNA, 24 bp, Artificial Sequence
  Synthetic: FXN 5 forward 9:69037156-69037186; SaCas9
ctcatgcccataatctcagcactt

SEQ ID NO: 49695 - DNA, 23 bp, Artificial Sequence
  Synthetic: FXN 5 forward 9:69037157-69037186; SaCas9
tcatgcccataatctcagcactt

SEQ ID NO: 49696 - DNA, 22 bp, Artificial Sequence
  Synthetic: FXN 5 forward 9:69037158-69037186; SaCas9
catgcccataatctcagcactt

SEQ ID NO: 49697 - DNA, 21 bp, Artificial Sequence
  Synthetic: FXN 5 forward 9:69037159-69037186; SaCas9
atgcccataatctcagcactt

SEQ ID NO: 49698 - DNA, 20 bp, Artificial Sequence
  Synthetic: FXN 5 forward 9:69037160-69037186; SaCas9
tgcccataatctcagcactt

SEQ ID NO: 49699 - DNA, 19 bp, Artificial Sequence
  Synthetic: FXN 5 forward 9:69037161-69037186; SaCas9
gcccataatctcagcactt

SEQ ID NO: 49700 - DNA, 18 bp, Artificial Sequence
  Synthetic: FXN 5 forward 9:69037162-69037186; SaCas9
cccataatctcagcactt

SEQ ID NO: 49701 - DNA, 25 bp, Artificial Sequence
  Synthetic: FXN 5 reverse 9:69037155-69037186; SaCas9
ctcccaaagtgctgagattatgggc

SEQ ID NO: 49702 - DNA, 24 bp, Artificial Sequence
  Synthetic: FXN 5 reverse 9:69037156-69037186; SaCas9
tcccaaagtgctgagattatgggc

SEQ ID NO: 49703 - DNA, 23 bp, Artificial Sequence
  Synthetic: FXN 5 reverse 9:69037157-69037186; SaCas9
cccaaagtgctgagattatgggc

SEQ ID NO: 49704 - DNA, 22 bp, Artificial Sequence
  Synthetic: FXN 5 reverse 9:69037158-69037186; SaCas9
ccaaagtgctgagattatgggc

SEQ ID NO: 49705 - DNA, 21 bp, Artificial Sequence
  Synthetic: FXN 5 reverse 9:69037159-69037186; SaCas9
caaagtgctgagattatgggc

SEQ ID NO: 49706 - DNA, 20 bp, Artificial Sequence
  Synthetic: FXN 5 reverse 9:69037160-69037186; SaCas9
aaagtgctgagattatgggc

SEQ ID NO: 49707 - DNA, 19 bp, Artificial Sequence
  Synthetic: FXN 5 reverse 9:69037161-69037186; SaCas9
aagtgctgagattatgggc

SEQ ID NO: 49708 - DNA, 18 bp, Artificial Sequence
  Synthetic: FXN 5 reverse 9:69037162-69037186; SaCas9
agtgctgagattatgggc

SEQ ID NO: 49709 - DNA, 25 bp, Artificial Sequence
  Synthetic: FXN 5 forward 9:69037156-69037187; SaCas9
ctcatgcccataatctcagcacttt

SEQ ID NO: 49710 - DNA, 24 bp, Artificial Sequence
  Synthetic: FXN 5 forward 9:69037157-69037187; SaCas9
tcatgcccataatctcagcacttt

SEQ ID NO: 49711 - DNA, 23 bp, Artificial Sequence
  Synthetic: FXN 5 forward 9:69037158-69037187; SaCas9
catgcccataatctcagcacttt

SEQ ID NO: 49712 - DNA, 22 bp, Artificial Sequence
  Synthetic: FXN 5 forward 9:69037159-69037187; SaCas9
atgcccataatctcagcacttt

SEQ ID NO: 49713 - DNA, 21 bp, Artificial Sequence
  Synthetic: FXN 5 forward 9:69037160-69037187; SaCas9
tgcccataatctcagcacttt

SEQ ID NO: 49714 - DNA, 20 bp, Artificial Sequence
  Synthetic: FXN 5 forward 9:69037161-69037187; SaCas9
gcccataatctcagcacttt

SEQ ID NO: 49715 - DNA, 19 bp, Artificial Sequence
  Synthetic: FXN 5 forward 9:69037162-69037187; SaCas9
cccataatctcagcacttt

SEQ ID NO: 49716 - DNA, 18 bp, Artificial Sequence
  Synthetic: FXN 5 forward 9:69037163-69037187; SaCas9
ccataatctcagcacttt

SEQ ID NO: 49717 - DNA, 25 bp, Artificial Sequence
  Synthetic: FXN 5 reverse 9:69037161-69037192; SaCas9
ctaggcctcccaaagtgctgagatt

SEQ ID NO: 49718 - DNA, 24 bp, Artificial Sequence
  Synthetic: FXN 5 reverse 9:69037162-69037192; SaCas9
taggcctcccaaagtgctgagatt

SEQ ID NO: 49719 - DNA, 23 bp, Artificial Sequence
  Synthetic: FXN 5 reverse 9:69037163-69037192; SaCas9
aggcctcccaaagtgctgagatt

SEQ ID NO: 49720 - DNA, 22 bp, Artificial Sequence
  Synthetic: FXN 5 reverse 9:69037164-69037192; SaCas9
ggcctcccaaagtgctgagatt

SEQ ID NO: 49721 - DNA, 21 bp, Artificial Sequence
  Synthetic: FXN 5 reverse 9:69037165-69037192; SaCas9
gcctcccaaagtgctgagatt

SEQ ID NO: 49722 - DNA, 20 bp, Artificial Sequence
  Synthetic: FXN 5 reverse 9:69037166-69037192; SaCas9
cctcccaaagtgctgagatt

SEQ ID NO: 49723 - DNA, 19 bp, Artificial Sequence
  Synthetic: FXN 5 reverse 9:69037167-69037192; SaCas9
ctcccaaagtgctgagatt

SEQ ID NO: 49724 - DNA, 18 bp, Artificial Sequence
  Synthetic: FXN 5 reverse 9:69037168-69037192; SaCas9
tcccaaagtgctgagatt

SEQ ID NO: 49725 - DNA, 25 bp, Artificial Sequence
  Synthetic: FXN 5 forward 9:69037164-69037195; SaCas9
cataatctcagcactttgggaggcc

SEQ ID NO: 49726 - DNA, 24 bp, Artificial Sequence
  Synthetic: FXN 5 forward 9:69037165-69037195; SaCas9
ataatctcagcactttgggaggcc

SEQ ID NO: 49727 - DNA, 23 bp, Artificial Sequence
  Synthetic: FXN 5 forward 9:69037166-69037195; SaCas9
taatctcagcactttgggaggcc

SEQ ID NO: 49728 - DNA, 22 bp, Artificial Sequence
  Synthetic: FXN 5 forward 9:69037167-69037195; SaCas9
aatctcagcactttgggaggcc

SEQ ID NO: 49729 - DNA, 21 bp, Artificial Sequence
  Synthetic: FXN 5 forward 9:69037168-69037195; SaCas9
atctcagcactttgggaggcc

SEQ ID NO: 49730 - DNA, 20 bp, Artificial Sequence
  Synthetic: FXN 5 forward 9:69037169-69037195; SaCas9
tctcagcactttgggaggcc

SEQ ID NO: 49731 - DNA, 19 bp, Artificial Sequence
  Synthetic: FXN 5 forward 9:69037170-69037195; SaCas9
ctcagcactttgggaggcc

SEQ ID NO: 49732 - DNA, 18 bp, Artificial Sequence
  Synthetic: FXN 5 forward 9:69037171-69037195; SaCas9
tcagcactttgggaggcc

SEQ ID NO: 49733 - DNA, 25 bp, Artificial Sequence
  Synthetic: FXN 5 forward 9:69037165-69037196; SaCas9
ataatctcagcactttgggaggcct

SEQ ID NO: 49734 - DNA, 24 bp, Artificial Sequence
  Synthetic: FXN 5 forward 9:69037166-69037196; SaCas9
taatctcagcactttgggaggcct

SEQ ID NO: 49735 - DNA, 23 bp, Artificial Sequence
  Synthetic: FXN 5 forward 9:69037167-69037196; SaCas9
aatctcagcactttgggaggcct

SEQ ID NO: 49736 - DNA, 22 bp, Artificial Sequence
  Synthetic: FXN 5 forward 9:69037168-69037196; SaCas9
atctcagcactttgggaggcct

SEQ ID NO: 49737 - DNA, 21 bp, Artificial Sequence
  Synthetic: FXN 5 forward 9:69037169-69037196; SaCas9
tctcagcactttgggaggcct

SEQ ID NO: 49738 - DNA, 20 bp, Artificial Sequence
  Synthetic: FXN 5 forward 9:69037170-69037196; SaCas9
ctcagcactttgggaggcct

SEQ ID NO: 49739 - DNA, 19 bp, Artificial Sequence
  Synthetic: FXN 5 forward 9:69037171-69037196; SaCas9
tcagcactttgggaggcct

SEQ ID NO: 49740 - DNA, 18 bp, Artificial Sequence
  Synthetic: FXN 5 forward 9:69037172-69037196; SaCas9
cagcactttgggaggcct

SEQ ID NO: 49741 - DNA, 25 bp, Artificial Sequence
  Synthetic: FXN 5 reverse 9:69037169-69037200; SaCas9
ccaccttcctaggcctcccaaagtg

SEQ ID NO: 49742 - DNA, 24 bp, Artificial Sequence
  Synthetic: FXN 5 reverse 9:69037170-69037200; SaCas9
caccttcctaggcctcccaaagtg

SEQ ID NO: 49743 - DNA, 23 bp, Artificial Sequence
  Synthetic: FXN 5 reverse 9:69037171-69037200; SaCas9
accttcctaggcctcccaaagtg

SEQ ID NO: 49744 - DNA, 22 bp, Artificial Sequence
  Synthetic: FXN 5 reverse 9:69037172-69037200; SaCas9
ccttcctaggcctcccaaagtg

SEQ ID NO: 49745 - DNA, 21 bp, Artificial Sequence
  Synthetic: FXN 5 reverse 9:69037173-69037200; SaCas9
cttcctaggcctcccaaagtg

SEQ ID NO: 49746 - DNA, 20 bp, Artificial Sequence
  Synthetic: FXN 5 reverse 9:69037174-69037200; SaCas9
ttcctaggcctcccaaagtg

SEQ ID NO: 49747 - DNA, 19 bp, Artificial Sequence
  Synthetic: FXN 5 reverse 9:69037175-69037200; SaCas9
tcctaggcctcccaaagtg

SEQ ID NO: 49748 - DNA, 18 bp, Artificial Sequence
  Synthetic: FXN 5 reverse 9:69037176-69037200; SaCas9
cctaggcctcccaaagtg

SEQ ID NO: 49749 - DNA, 25 bp, Artificial Sequence
  Synthetic: FXN 5 forward 9:69037171-69037202; SaCas9
tcagcactttgggaggcctaggaag

SEQ ID NO: 49750 - DNA, 24 bp, Artificial Sequence
  Synthetic: FXN 5 forward 9:69037172-69037202; SaCas9
cagcactttgggaggcctaggaag

SEQ ID NO: 49751 - DNA, 23 bp, Artificial Sequence
  Synthetic: FXN 5 forward 9:69037173-69037202; SaCas9
agcactttgggaggcctaggaag

SEQ ID NO: 49752 - DNA, 22 bp, Artificial Sequence
  Synthetic: FXN 5 forward 9:69037174-69037202; SaCas9
gcactttgggaggcctaggaag

SEQ ID NO: 49753 - DNA, 21 bp, Artificial Sequence
  Synthetic: FXN 5 forward 9:69037175-69037202; SaCas9
cactttgggaggcctaggaag

SEQ ID NO: 49754 - DNA, 20 bp, Artificial Sequence
  Synthetic: FXN 5 forward 9:69037176-69037202; SaCas9
actttgggaggcctaggaag

SEQ ID NO: 49755 - DNA, 19 bp, Artificial Sequence
  Synthetic: FXN 5 forward 9:69037177-69037202; SaCas9
ctttgggaggcctaggaag

SEQ ID NO: 49756 - DNA, 18 bp, Artificial Sequence
  Synthetic: FXN 5 forward 9:69037178-69037202; SaCas9
tttgggaggcctaggaag

SEQ ID NO: 49757 - DNA, 25 bp, Artificial Sequence
  Synthetic: FXN 5 forward 9:69037180-69037211; SaCas9
tgggaggcctaggaaggtggatcac

SEQ ID NO: 49758 - DNA, 24 bp, Artificial Sequence
  Synthetic: FXN 5 forward 9:69037181-69037211; SaCas9
gggaggcctaggaaggtggatcac

SEQ ID NO: 49759 - DNA, 23 bp, Artificial Sequence
  Synthetic: FXN 5 forward 9:69037182-69037211; SaCas9
ggaggcctaggaaggtggatcac

SEQ ID NO: 49760 - DNA, 22 bp, Artificial Sequence
  Synthetic: FXN 5 forward 9:69037183-69037211; SaCas9
gaggcctaggaaggtggatcac

SEQ ID NO: 49761 - DNA, 21 bp, Artificial Sequence
  Synthetic: FXN 5 forward 9:69037184-69037211; SaCas9
aggcctaggaaggtggatcac

SEQ ID NO: 49762 - DNA, 20 bp, Artificial Sequence
  Synthetic: FXN 5 forward 9:69037185-69037211; SaCas9
ggcctaggaaggtggatcac

SEQ ID NO: 49763 - DNA, 19 bp, Artificial Sequence
  Synthetic: FXN 5 forward 9:69037186-69037211; SaCas9
gcctaggaaggtggatcac

SEQ ID NO: 49764 - DNA, 18 bp, Artificial Sequence
  Synthetic: FXN 5 forward 9:69037187-69037211; SaCas9
cctaggaaggtggatcac

SEQ ID NO: 49765 - DNA, 25 bp, Artificial Sequence
  Synthetic: FXN 5 forward 9:69037187-69037218; SaCas9
cctaggaaggtggatcacctgaggt

SEQ ID NO: 49766 - DNA, 24 bp, Artificial Sequence
  Synthetic: FXN 5 forward 9:69037188-69037218; SaCas9
ctaggaaggtggatcacctgaggt

SEQ ID NO: 49767 - DNA, 23 bp, Artificial Sequence
  Synthetic: FXN 5 forward 9:69037189-69037218; SaCas9
taggaaggtggatcacctgaggt

SEQ ID NO: 49768 - DNA, 22 bp, Artificial Sequence
  Synthetic: FXN 5 forward 9:69037190-69037218; SaCas9
aggaaggtggatcacctgaggt

SEQ ID NO: 49769 - DNA, 21 bp, Artificial Sequence
  Synthetic: FXN 5 forward 9:69037191-69037218; SaCas9
ggaaggtggatcacctgaggt

SEQ ID NO: 49770 - DNA, 20 bp, Artificial Sequence
  Synthetic: FXN 5 forward 9:69037192-69037218; SaCas9
gaaggtggatcacctgaggt

SEQ ID NO: 49771 - DNA, 19 bp, Artificial Sequence
  Synthetic: FXN 5 forward 9:69037193-69037218; SaCas9
aaggtggatcacctgaggt

SEQ ID NO: 49772 - DNA, 18 bp, Artificial Sequence
  Synthetic: FXN 5 forward 9:69037194-69037218; SaCas9
aggtggatcacctgaggt

SEQ ID NO: 49773 - DNA, 25 bp, Artificial Sequence
  Synthetic: FXN 5 forward 9:69037188-69037219; SaCas9
ctaggaaggtggatcacctgaggtc

SEQ ID NO: 49774 - DNA, 24 bp, Artificial Sequence
  Synthetic: FXN 5 forward 9:69037189-69037219; SaCas9
taggaaggtggatcacctgaggtc

SEQ ID NO: 49775 - DNA, 23 bp, Artificial Sequence
  Synthetic: FXN 5 forward 9:69037190-69037219; SaCas9
aggaaggtggatcacctgaggtc

SEQ ID NO: 49776 - DNA, 22 bp, Artificial Sequence
  Synthetic: FXN 5 forward 9:69037191-69037219; SaCas9
ggaaggtggatcacctgaggtc

SEQ ID NO: 49777 - DNA, 21 bp, Artificial Sequence
  Synthetic: FXN 5 forward 9:69037192-69037219; SaCas9
gaaggtggatcacctgaggtc

SEQ ID NO: 49778 - DNA, 20 bp, Artificial Sequence
  Synthetic: FXN 5 forward 9:69037193-69037219; SaCas9
aaggtggatcacctgaggtc

SEQ ID NO: 49779 - DNA, 19 bp, Artificial Sequence
  Synthetic: FXN 5 forward 9:69037194-69037219; SaCas9
aggtggatcacctgaggtc

SEQ ID NO: 49780 - DNA, 18 bp, Artificial Sequence
  Synthetic: FXN 5 forward 9:69037195-69037219; SaCas9
ggtggatcacctgaggtc

SEQ ID NO: 49781 - DNA, 25 bp, Artificial Sequence
  Synthetic: FXN 5 reverse 9:69037210-69037241; SaCas9
atgttggccaggttagtcttgaact

SEQ ID NO: 49782 - DNA, 24 bp, Artificial Sequence
  Synthetic: FXN 5 reverse 9:69037211-69037241; SaCas9
tgttggccaggttagtcttgaact

SEQ ID NO: 49783 - DNA, 23 bp, Artificial Sequence
  Synthetic: FXN 5 reverse 9:69037212-69037241; SaCas9
gttggccaggttagtcttgaact

SEQ ID NO: 49784 - DNA, 22 bp, Artificial Sequence
  Synthetic: FXN 5 reverse 9:69037213-69037241; SaCas9
ttggccaggttagtcttgaact

SEQ ID NO: 49785 - DNA, 21 bp, Artificial Sequence
  Synthetic: FXN 5 reverse 9:69037214-69037241; SaCas9
tggccaggttagtcttgaact

SEQ ID NO: 49786 - DNA, 20 bp, Artificial Sequence
  Synthetic: FXN 5 reverse 9:69037215-69037241; SaCas9
ggccaggttagtcttgaact

SEQ ID NO: 49787 - DNA, 19 bp, Artificial Sequence
  Synthetic: FXN 5 reverse 9:69037216-69037241; SaCas9
gccaggttagtcttgaact

SEQ ID NO: 49788 - DNA, 18 bp, Artificial Sequence
  Synthetic: FXN 5 reverse 9:69037217-69037241; SaCas9
ccaggttagtcttgaact

SEQ ID NO: 49789 - DNA, 25 bp, Artificial Sequence
  Synthetic: FXN 5 forward 9:69037217-69037248; SaCas9
gttcaagactaacctggccaacatg

SEQ ID NO: 49790 - DNA, 24 bp, Artificial Sequence
  Synthetic: FXN 5 forward 9:69037218-69037248; SaCas9
ttcaagactaacctggccaacatg

SEQ ID NO: 49791 - DNA, 23 bp, Artificial Sequence
  Synthetic: FXN 5 forward 9:69037219-69037248; SaCas9
tcaagactaacctggccaacatg

SEQ ID NO: 49792 - DNA, 22 bp, Artificial Sequence
  Synthetic: FXN 5 forward 9:69037220-69037248; SaCas9
caagactaacctggccaacatg

SEQ ID NO: 49793 - DNA, 21 bp, Artificial Sequence
  Synthetic: FXN 5 forward 9:69037221-69037248; SaCas9
aagactaacctggccaacatg

SEQ ID NO: 49794 - DNA, 20 bp, Artificial Sequence
  Synthetic: FXN 5 forward 9:69037222-69037248; SaCas9
agactaacctggccaacatg

SEQ ID NO: 49795 - DNA, 19 bp, Artificial Sequence
  Synthetic: FXN 5 forward 9:69037223-69037248; SaCas9
gactaacctggccaacatg

SEQ ID NO: 49796 - DNA, 18 bp, Artificial Sequence
  Synthetic: FXN 5 forward 9:69037224-69037248; SaCas9
actaacctggccaacatg

SEQ ID NO: 49797 - DNA, 25 bp, Artificial Sequence
  Synthetic: FXN 5 reverse 9:69037217-69037248; SaCas9
tttcaccatgttggccaggttagtc

SEQ ID NO: 49798 - DNA, 24 bp, Artificial Sequence
  Synthetic: FXN 5 reverse 9:69037218-69037248; SaCas9
ttcaccatgttggccaggttagtc

SEQ ID NO: 49799 - DNA, 23 bp, Artificial Sequence
  Synthetic: FXN 5 reverse 9:69037219-69037248; SaCas9
tcaccatgttggccaggttagtc

SEQ ID NO: 49800 - DNA, 22 bp, Artificial Sequence
  Synthetic: FXN 5 reverse 9:69037220-69037248; SaCas9
caccatgttggccaggttagtc

SEQ ID NO: 49801 - DNA, 21 bp, Artificial Sequence
  Synthetic: FXN 5 reverse 9:69037221-69037248; SaCas9
accatgttggccaggttagtc

SEQ ID NO: 49802 - DNA, 20 bp, Artificial Sequence
  Synthetic: FXN 5 reverse 9:69037222-69037248; SaCas9
ccatgttggccaggttagtc

SEQ ID NO: 49803 - DNA, 19 bp, Artificial Sequence
  Synthetic: FXN 5 reverse 9:69037223-69037248; SaCas9
catgttggccaggttagtc

SEQ ID NO: 49804 - DNA, 18 bp, Artificial Sequence
  Synthetic: FXN 5 reverse 9:69037224-69037248; SaCas9
atgttggccaggttagtc

SEQ ID NO: 49805 - DNA, 25 bp, Artificial Sequence
  Synthetic: FXN 5 reverse 9:69037247-69037278; SaCas9
ttttttttgtattttttagtagata

SEQ ID NO: 49806 - DNA, 24 bp, Artificial Sequence
  Synthetic: FXN 5 reverse 9:69037248-69037278; SaCas9
tttttttgtattttttagtagata

SEQ ID NO: 49807 - DNA, 23 bp, Artificial Sequence
  Synthetic: FXN 5 reverse 9:69037249-69037278; SaCas9
ttttttgtattttttagtagata

SEQ ID NO: 49808 - DNA, 22 bp, Artificial Sequence
  Synthetic: FXN 5 reverse 9:69037250-69037278; SaCas9
tttttgtattttttagtagata

SEQ ID NO: 49809 - DNA, 21 bp, Artificial Sequence
  Synthetic: FXN 5 reverse 9:69037251-69037278; SaCas9
ttttgtattttttagtagata

SEQ ID NO: 49810 - DNA, 20 bp, Artificial Sequence
  Synthetic: FXN 5 reverse 9:69037252-69037278; SaCas9
tttgtattttttagtagata

SEQ ID NO: 49811 - DNA, 19 bp, Artificial Sequence
  Synthetic: FXN 5 reverse 9:69037253-69037278; SaCas9
ttgtattttttagtagata

SEQ ID NO: 49812 - DNA, 18 bp, Artificial Sequence
  Synthetic: FXN 5 reverse 9:69037254-69037278; SaCas9
tgtattttttagtagata

SEQ ID NO: 49813 - DNA, 25 bp, Artificial Sequence
  Synthetic: FXN 5 forward 9:69037259-69037290; SaCas9
ctaaaaaatacaaaaaaaaaaaaaa

SEQ ID NO: 49814 - DNA, 24 bp, Artificial Sequence
  Synthetic: FXN 5 forward 9:69037260-69037290; SaCas9
taaaaaatacaaaaaaaaaaaaaa

SEQ ID NO: 49815 - DNA, 23 bp, Artificial Sequence
  Synthetic: FXN 5 forward 9:69037261-69037290; SaCas9
aaaaaatacaaaaaaaaaaaaaa

SEQ ID NO: 49816 - DNA, 22 bp, Artificial Sequence
  Synthetic: FXN 5 forward 9:69037262-69037290; SaCas9
aaaaatacaaaaaaaaaaaaaa

SEQ ID NO: 49817 - DNA, 21 bp, Artificial Sequence
  Synthetic: FXN 5 forward 9:69037263-69037290; SaCas9
aaaatacaaaaaaaaaaaaaa

SEQ ID NO: 49818 - DNA, 20 bp, Artificial Sequence
  Synthetic: FXN 5 forward 9:69037264-69037290; SaCas9
aaatacaaaaaaaaaaaaaa

SEQ ID NO: 49819 - DNA, 19 bp, Artificial Sequence
  Synthetic: FXN 5 forward 9:69037265-69037290; SaCas9
aatacaaaaaaaaaaaaaa

SEQ ID NO: 49820 - DNA, 18 bp, Artificial Sequence
  Synthetic: FXN 5 forward 9:69037266-69037290; SaCas9
atacaaaaaaaaaaaaaa

SEQ ID NO: 49821 - DNA, 25 bp, Artificial Sequence
  Synthetic: FXN 5 forward 9:69037262-69037293; SaCas9
aaaaatacaaaaaaaaaaaaaaaag

SEQ ID NO: 49822 - DNA, 24 bp, Artificial Sequence
  Synthetic: FXN 5 forward 9:69037263-69037293; SaCas9
aaaatacaaaaaaaaaaaaaaaag

SEQ ID NO: 49823 - DNA, 23 bp, Artificial Sequence
  Synthetic: FXN 5 forward 9:69037264-69037293; SaCas9
aaatacaaaaaaaaaaaaaaaag

SEQ ID NO: 49824 - DNA, 22 bp, Artificial Sequence
  Synthetic: FXN 5 forward 9:69037265-69037293; SaCas9
aatacaaaaaaaaaaaaaaaag

SEQ ID NO: 49825 - DNA, 21 bp, Artificial Sequence
  Synthetic: FXN 5 forward 9:69037266-69037293; SaCas9
atacaaaaaaaaaaaaaaaag

SEQ ID NO: 49826 - DNA, 20 bp, Artificial Sequence
  Synthetic: FXN 5 forward 9:69037267-69037293; SaCas9
tacaaaaaaaaaaaaaaaag

SEQ ID NO: 49827 - DNA, 19 bp, Artificial Sequence
  Synthetic: FXN 5 forward 9:69037268-69037293; SaCas9
acaaaaaaaaaaaaaaaag

SEQ ID NO: 49828 - DNA, 18 bp, Artificial Sequence
  Synthetic: FXN 5 forward 9:69037269-69037293; SaCas9
caaaaaaaaaaaaaaaag

SEQ ID NO: 49829 - DNA, 25 bp, Artificial Sequence
  Synthetic: FXN 5 forward 9:69037265-69037296; SaCas9
aatacaaaaaaaaaaaaaaaagaag

SEQ ID NO: 49830 - DNA, 24 bp, Artificial Sequence
  Synthetic: FXN 5 forward 9:69037266-69037296; SaCas9
atacaaaaaaaaaaaaaaaagaag

SEQ ID NO: 49831 - DNA, 23 bp, Artificial Sequence
  Synthetic: FXN 5 forward 9:69037267-69037296; SaCas9
tacaaaaaaaaaaaaaaaagaag

SEQ ID NO: 49832 - DNA, 22 bp, Artificial Sequence
  Synthetic: FXN 5 forward 9:69037268-69037296; SaCas9
acaaaaaaaaaaaaaaaagaag

SEQ ID NO: 49833 - DNA, 21 bp, Artificial Sequence
  Synthetic: FXN 5 forward 9:69037269-69037296; SaCas9
caaaaaaaaaaaaaaaagaag

SEQ ID NO: 49834 - DNA, 20 bp, Artificial Sequence
  Synthetic: FXN 5 forward 9:69037270-69037296; SaCas9
aaaaaaaaaaaaaaaagaag

SEQ ID NO: 49835 - DNA, 19 bp, Artificial Sequence
  Synthetic: FXN 5 forward 9:69037271-69037296; SaCas9
aaaaaaaaaaaaaaagaag

SEQ ID NO: 49836 - DNA, 18 bp, Artificial Sequence
  Synthetic: FXN 5 forward 9:69037272-69037296; SaCas9
aaaaaaaaaaaaaagaag

SEQ ID NO: 49837 - DNA, 25 bp, Artificial Sequence
  Synthetic: FXN 5 forward 9:69037268-69037299; SaCas9
acaaaaaaaaaaaaaaaagaagaag

SEQ ID NO: 49838 - DNA, 24 bp, Artificial Sequence
  Synthetic: FXN 5 forward 9:69037269-69037299; SaCas9
caaaaaaaaaaaaaaaagaagaag

SEQ ID NO: 49839 - DNA, 23 bp, Artificial Sequence
  Synthetic: FXN 5 forward 9:69037270-69037299; SaCas9
aaaaaaaaaaaaaaaagaagaag

SEQ ID NO: 49840 - DNA, 22 bp, Artificial Sequence
  Synthetic: FXN 5 forward 9:69037271-69037299; SaCas9
aaaaaaaaaaaaaaagaagaag

SEQ ID NO: 49841 - DNA, 21 bp, Artificial Sequence
  Synthetic: FXN 5 forward 9:69037272-69037299; SaCas9
aaaaaaaaaaaaaagaagaag

SEQ ID NO: 49842 - DNA, 20 bp, Artificial Sequence
  Synthetic: FXN 5 forward 9:69037273-69037299; SaCas9
aaaaaaaaaaaaagaagaag

SEQ ID NO: 49843 - DNA, 19 bp, Artificial Sequence
  Synthetic: FXN 5 forward 9:69037274-69037299; SaCas9
aaaaaaaaaaaagaagaag

SEQ ID NO: 49844 - DNA, 18 bp, Artificial Sequence
  Synthetic: FXN 5 forward 9:69037275-69037299; SaCas9
aaaaaaaaaaagaagaag

SEQ ID NO: 49845 - DNA, 25 bp, Artificial Sequence
  Synthetic: FXN 5 forward 9:69037271-69037302; SaCas9
aaaaaaaaaaaaaaagaagaagaag

SEQ ID NO: 49846 - DNA, 24 bp, Artificial Sequence
  Synthetic: FXN 5 forward 9:69037272-69037302; SaCas9
aaaaaaaaaaaaaagaagaagaag

SEQ ID NO: 49847 - DNA, 23 bp, Artificial Sequence
  Synthetic: FXN 5 forward 9:69037273-69037302; SaCas9
aaaaaaaaaaaaagaagaagaag

SEQ ID NO: 49848 - DNA, 22 bp, Artificial Sequence
  Synthetic: FXN 5 forward 9:69037274-69037302; SaCas9
aaaaaaaaaaaagaagaagaag

SEQ ID NO: 49849 - DNA, 21 bp, Artificial Sequence
  Synthetic: FXN 5 forward 9:69037275-69037302; SaCas9
aaaaaaaaaaagaagaagaag

SEQ ID NO: 49850 - DNA, 20 bp, Artificial Sequence
  Synthetic: FXN 5 forward 9:69037276-69037302; SaCas9
aaaaaaaaaagaagaagaag

SEQ ID NO: 49851 - DNA, 19 bp, Artificial Sequence
  Synthetic: FXN 5 forward 9:69037277-69037302; SaCas9
aaaaaaaaagaagaagaag

SEQ ID NO: 49852 - DNA, 18 bp, Artificial Sequence
  Synthetic: FXN 5 forward 9:69037278-69037302; SaCas9
aaaaaaaagaagaagaag

SEQ ID NO: 49853 - DNA, 25 bp, Artificial Sequence
  Synthetic: FXN 5 forward 9:69035936-69035964; SpCas9
cccgccgcgcagtaagtatccgcgc

SEQ ID NO: 49854 - DNA, 24 bp, Artificial Sequence
  Synthetic: FXN 5 forward 9:69035937-69035964; SpCas9
ccgccgcgcagtaagtatccgcgc

SEQ ID NO: 49855 - DNA, 23 bp, Artificial Sequence
  Synthetic: FXN 5 forward 9:69035938-69035964; SpCas9
cgccgcgcagtaagtatccgcgc

SEQ ID NO: 49856 - DNA, 22 bp, Artificial Sequence
  Synthetic: FXN 5 forward 9:69035939-69035964; SpCas9
gccgcgcagtaagtatccgcgc

SEQ ID NO: 49857 - DNA, 21 bp, Artificial Sequence
  Synthetic: FXN 5 forward 9:69035940-69035964; SpCas9
ccgcgcagtaagtatccgcgc

SEQ ID NO: 49858 - DNA, 20 bp, Artificial Sequence
  Synthetic: FXN 5 forward 9:69035941-69035964; SpCas9
cgcgcagtaagtatccgcgc

SEQ ID NO: 49859 - DNA, 19 bp, Artificial Sequence
  Synthetic: FXN 5 forward 9:69035942-69035964; SpCas9
gcgcagtaagtatccgcgc

SEQ ID NO: 49860 - DNA, 18 bp, Artificial Sequence
  Synthetic: FXN 5 forward 9:69035943-69035964; SpCas9
cgcagtaagtatccgcgc

SEQ ID NO: 49861 - DNA, 25 bp, Artificial Sequence
  Synthetic: FXN 5 forward 9:69035937-69035965; SpCas9
ccgccgcgcagtaagtatccgcgcc

SEQ ID NO: 49862 - DNA, 24 bp, Artificial Sequence
  Synthetic: FXN 5 forward 9:69035938-69035965; SpCas9
cgccgcgcagtaagtatccgcgcc

SEQ ID NO: 49863 - DNA, 23 bp, Artificial Sequence
  Synthetic: FXN 5 forward 9:69035939-69035965; SpCas9
gccgcgcagtaagtatccgcgcc

SEQ ID NO: 49864 - DNA, 22 bp, Artificial Sequence
  Synthetic: FXN 5 forward 9:69035940-69035965; SpCas9
ccgcgcagtaagtatccgcgcc

SEQ ID NO: 49865 - DNA, 21 bp, Artificial Sequence
  Synthetic: FXN 5 forward 9:69035941-69035965; SpCas9
cgcgcagtaagtatccgcgcc

SEQ ID NO: 49866 - DNA, 20 bp, Artificial Sequence
  Synthetic: FXN 5 forward 9:69035942-69035965; SpCas9
gcgcagtaagtatccgcgcc

SEQ ID NO: 49867 - DNA, 19 bp, Artificial Sequence
  Synthetic: FXN 5 forward 9:69035943-69035965; SpCas9
cgcagtaagtatccgcgcc

SEQ ID NO: 49868 - DNA, 18 bp, Artificial Sequence
  Synthetic: FXN 5 forward 9:69035944-69035965; SpCas9
gcagtaagtatccgcgcc

SEQ ID NO: 49869 - DNA, 25 bp, Artificial Sequence
  Synthetic: FXN 5 forward 9:69035942-69035970; SpCas9
gcgcagtaagtatccgcgccgggaa

SEQ ID NO: 49870 - DNA, 24 bp, Artificial Sequence
  Synthetic: FXN 5 forward 9:69035943-69035970; SpCas9
cgcagtaagtatccgcgccgggaa

SEQ ID NO: 49871 - DNA, 23 bp, Artificial Sequence
  Synthetic: FXN 5 forward 9:69035944-69035970; SpCas9
gcagtaagtatccgcgccgggaa

SEQ ID NO: 49872 - DNA, 22 bp, Artificial Sequence
  Synthetic: FXN 5 forward 9:69035945-69035970; SpCas9
cagtaagtatccgcgccgggaa

SEQ ID NO: 49873 - DNA, 21 bp, Artificial Sequence
  Synthetic: FXN 5 forward 9:69035946-69035970; SpCas9
agtaagtatccgcgccgggaa

SEQ ID NO: 49874 - DNA, 20 bp, Artificial Sequence
  Synthetic: FXN 5 forward 9:69035947-69035970; SpCas9
gtaagtatccgcgccgggaa

SEQ ID NO: 49875 - DNA, 19 bp, Artificial Sequence
  Synthetic: FXN 5 forward 9:69035948-69035970; SpCas9
taagtatccgcgccgggaa

SEQ ID NO: 49876 - DNA, 18 bp, Artificial Sequence
  Synthetic: FXN 5 forward 9:69035949-69035970; SpCas9
aagtatccgcgccgggaa

SEQ ID NO: 49877 - DNA, 25 bp, Artificial Sequence
  Synthetic: FXN 5 forward 9:69035948-69035976; SpCas9
taagtatccgcgccgggaacagccg

SEQ ID NO: 49878 - DNA, 24 bp, Artificial Sequence
  Synthetic: FXN 5 forward 9:69035949-69035976; SpCas9
aagtatccgcgccgggaacagccg

SEQ ID NO: 49879 - DNA, 23 bp, Artificial Sequence
  Synthetic: FXN 5 forward 9:69035950-69035976; SpCas9
agtatccgcgccgggaacagccg

SEQ ID NO: 49880 - DNA, 22 bp, Artificial Sequence
  Synthetic: FXN 5 forward 9:69035951-69035976; SpCas9
gtatccgcgccgggaacagccg

SEQ ID NO: 49881 - DNA, 21 bp, Artificial Sequence
  Synthetic: FXN 5 forward 9:69035952-69035976; SpCas9
tatccgcgccgggaacagccg

SEQ ID NO: 49882 - DNA, 20 bp, Artificial Sequence
  Synthetic: FXN 5 forward 9:69035953-69035976; SpCas9
atccgcgccgggaacagccg

SEQ ID NO: 49883 - DNA, 19 bp, Artificial Sequence
  Synthetic: FXN 5 forward 9:69035954-69035976; SpCas9
tccgcgccgggaacagccg

SEQ ID NO: 49884 - DNA, 18 bp, Artificial Sequence
  Synthetic: FXN 5 forward 9:69035955-69035976; SpCas9
ccgcgccgggaacagccg

SEQ ID NO: 49885 - DNA, 25 bp, Artificial Sequence
  Synthetic: FXN 5 forward 9:69035949-69035977; SpCas9
aagtatccgcgccgggaacagccgc

SEQ ID NO: 49886 - DNA, 24 bp, Artificial Sequence
  Synthetic: FXN 5 forward 9:69035950-69035977; SpCas9
agtatccgcgccgggaacagccgc

SEQ ID NO: 49887 - DNA, 23 bp, Artificial Sequence
  Synthetic: FXN 5 forward 9:69035951-69035977; SpCas9
gtatccgcgccgggaacagccgc

SEQ ID NO: 49888 - DNA, 22 bp, Artificial Sequence
  Synthetic: FXN 5 forward 9:69035952-69035977; SpCas9
tatccgcgccgggaacagccgc

SEQ ID NO: 49889 - DNA, 21 bp, Artificial Sequence
  Synthetic: FXN 5 forward 9:69035953-69035977; SpCas9
atccgcgccgggaacagccgc

SEQ ID NO: 49890 - DNA, 20 bp, Artificial Sequence
  Synthetic: FXN 5 forward 9:69035954-69035977; SpCas9
tccgcgccgggaacagccgc

SEQ ID NO: 49891 - DNA, 19 bp, Artificial Sequence
  Synthetic: FXN 5 forward 9:69035955-69035977; SpCas9
ccgcgccgggaacagccgc

SEQ ID NO: 49892 - DNA, 18 bp, Artificial Sequence
  Synthetic: FXN 5 forward 9:69035956-69035977; SpCas9
cgcgccgggaacagccgc

SEQ ID NO: 49893 - DNA, 25 bp, Artificial Sequence
  Synthetic: FXN 5 reverse 9:69035955-69035983; SpCas9
gtgcggcccgcggctgttcccggcg

SEQ ID NO: 49894 - DNA, 24 bp, Artificial Sequence
  Synthetic: FXN 5 reverse 9:69035956-69035983; SpCas9
tgcggcccgcggctgttcccggcg

SEQ ID NO: 49895 - DNA, 23 bp, Artificial Sequence
  Synthetic: FXN 5 reverse 9:69035957-69035983; SpCas9
gcggcccgcggctgttcccggcg

SEQ ID NO: 49896 - DNA, 22 bp, Artificial Sequence
  Synthetic: FXN 5 reverse 9:69035958-69035983; SpCas9
cggcccgcggctgttcccggcg

SEQ ID NO: 49897 - DNA, 21 bp, Artificial Sequence
  Synthetic: FXN 5 reverse 9:69035959-69035983; SpCas9
ggcccgcggctgttcccggcg

SEQ ID NO: 49898 - DNA, 20 bp, Artificial Sequence
  Synthetic: FXN 5 reverse 9:69035960-69035983; SpCas9
gcccgcggctgttcccggcg

SEQ ID NO: 49899 - DNA, 19 bp, Artificial Sequence
  Synthetic: FXN 5 reverse 9:69035961-69035983; SpCas9
cccgcggctgttcccggcg

SEQ ID NO: 49900 - DNA, 18 bp, Artificial Sequence
  Synthetic: FXN 5 reverse 9:69035962-69035983; SpCas9
ccgcggctgttcccggcg

SEQ ID NO: 49901 - DNA, 25 bp, Artificial Sequence
  Synthetic: FXN 5 reverse 9:69035960-69035988; SpCas9
gcggcgtgcggcccgcggctgttcc

SEQ ID NO: 49902 - DNA, 24 bp, Artificial Sequence
  Synthetic: FXN 5 reverse 9:69035961-69035988; SpCas9
cggcgtgcggcccgcggctgttcc

SEQ ID NO: 49903 - DNA, 23 bp, Artificial Sequence
  Synthetic: FXN 5 reverse 9:69035962-69035988; SpCas9
ggcgtgcggcccgcggctgttcc

SEQ ID NO: 49904 - DNA, 22 bp, Artificial Sequence
  Synthetic: FXN 5 reverse 9:69035963-69035988; SpCas9
gcgtgcggcccgcggctgttcc

SEQ ID NO: 49905 - DNA, 21 bp, Artificial Sequence
  Synthetic: FXN 5 reverse 9:69035964-69035988; SpCas9
cgtgcggcccgcggctgttcc

SEQ ID NO: 49906 - DNA, 20 bp, Artificial Sequence
  Synthetic: FXN 5 reverse 9:69035965-69035988; SpCas9
gtgcggcccgcggctgttcc

SEQ ID NO: 49907 - DNA, 19 bp, Artificial Sequence
  Synthetic: FXN 5 reverse 9:69035966-69035988; SpCas9
tgcggcccgcggctgttcc

SEQ ID NO: 49908 - DNA, 18 bp, Artificial Sequence
  Synthetic: FXN 5 reverse 9:69035967-69035988; SpCas9
gcggcccgcggctgttcc

SEQ ID NO: 49909 - DNA, 25 bp, Artificial Sequence
  Synthetic: FXN 5 forward 9:69035962-69035990; SpCas9
gggaacagccgcgggccgcacgccg

SEQ ID NO: 49910 - DNA, 24 bp, Artificial Sequence
  Synthetic: FXN 5 forward 9:69035963-69035990; SpCas9
ggaacagccgcgggccgcacgccg

SEQ ID NO: 49911 - DNA, 23 bp, Artificial Sequence
  Synthetic: FXN 5 forward 9:69035964-69035990; SpCas9
gaacagccgcgggccgcacgccg

SEQ ID NO: 49912 - DNA, 22 bp, Artificial Sequence
  Synthetic: FXN 5 forward 9:69035965-69035990; SpCas9
aacagccgcgggccgcacgccg

SEQ ID NO: 49913 - DNA, 21 bp, Artificial Sequence
  Synthetic: FXN 5 forward 9:69035966-69035990; SpCas9
acagccgcgggccgcacgccg

SEQ ID NO: 49914 - DNA, 20 bp, Artificial Sequence
  Synthetic: FXN 5 forward 9:69035967-69035990; SpCas9
cagccgcgggccgcacgccg

SEQ ID NO: 49915 - DNA, 19 bp, Artificial Sequence
  Synthetic: FXN 5 forward 9:69035968-69035990; SpCas9
agccgcgggccgcacgccg

SEQ ID NO: 49916 - DNA, 18 bp, Artificial Sequence
  Synthetic: FXN 5 forward 9:69035969-69035990; SpCas9
gccgcgggccgcacgccg

SEQ ID NO: 49917 - DNA, 25 bp, Artificial Sequence
  Synthetic: FXN 5 forward 9:69035963-69035991; SpCas9
ggaacagccgcgggccgcacgccgc

SEQ ID NO: 49918 - DNA, 24 bp, Artificial Sequence
  Synthetic: FXN 5 forward 9:69035964-69035991; SpCas9
gaacagccgcgggccgcacgccgc

SEQ ID NO: 49919 - DNA, 23 bp, Artificial Sequence
  Synthetic: FXN 5 forward 9:69035965-69035991; SpCas9
aacagccgcgggccgcacgccgc

SEQ ID NO: 49920 - DNA, 22 bp, Artificial Sequence
  Synthetic: FXN 5 forward 9:69035966-69035991; SpCas9
acagccgcgggccgcacgccgc

SEQ ID NO: 49921 - DNA, 21 bp, Artificial Sequence
  Synthetic: FXN 5 forward 9:69035967-69035991; SpCas9
cagccgcgggccgcacgccgc

SEQ ID NO: 49922 - DNA, 20 bp, Artificial Sequence
  Synthetic: FXN 5 forward 9:69035968-69035991; SpCas9
agccgcgggccgcacgccgc

SEQ ID NO: 49923 - DNA, 19 bp, Artificial Sequence
  Synthetic: FXN 5 forward 9:69035969-69035991; SpCas9
gccgcgggccgcacgccgc

SEQ ID NO: 49924 - DNA, 18 bp, Artificial Sequence
  Synthetic: FXN 5 forward 9:69035970-69035991; SpCas9
ccgcgggccgcacgccgc

SEQ ID NO: 49925 - DNA, 25 bp, Artificial Sequence
  Synthetic: FXN 5 reverse 9:69035970-69035998; SpCas9
cgtgcggcccgcggcgtgcggcccg

SEQ ID NO: 49926 - DNA, 24 bp, Artificial Sequence
  Synthetic: FXN 5 reverse 9:69035971-69035998; SpCas9
gtgcggcccgcggcgtgcggcccg

SEQ ID NO: 49927 - DNA, 23 bp, Artificial Sequence
  Synthetic: FXN 5 reverse 9:69035972-69035998; SpCas9
tgcggcccgcggcgtgcggcccg

SEQ ID NO: 49928 - DNA, 22 bp, Artificial Sequence
  Synthetic: FXN 5 reverse 9:69035973-69035998; SpCas9
gcggcccgcggcgtgcggcccg

SEQ ID NO: 49929 - DNA, 21 bp, Artificial Sequence
  Synthetic: FXN 5 reverse 9:69035974-69035998; SpCas9
cggcccgcggcgtgcggcccg

SEQ ID NO: 49930 - DNA, 20 bp, Artificial Sequence
  Synthetic: FXN 5 reverse 9:69035975-69035998; SpCas9
ggcccgcggcgtgcggcccg

SEQ ID NO: 49931 - DNA, 19 bp, Artificial Sequence
  Synthetic: FXN 5 reverse 9:69035976-69035998; SpCas9
gcccgcggcgtgcggcccg

SEQ ID NO: 49932 - DNA, 18 bp, Artificial Sequence
  Synthetic: FXN 5 reverse 9:69035977-69035998; SpCas9
cccgcggcgtgcggcccg

SEQ ID NO: 49933 - DNA, 25 bp, Artificial Sequence
  Synthetic: FXN 5 reverse 9:69035977-69036005; SpCas9
cgtgcggcgtgcggcccgcggcgtg

SEQ ID NO: 49934 - DNA, 24 bp, Artificial Sequence
  Synthetic: FXN 5 reverse 9:69035978-69036005; SpCas9
gtgcggcgtgcggcccgcggcgtg

SEQ ID NO: 49935 - DNA, 23 bp, Artificial Sequence
  Synthetic: FXN 5 reverse 9:69035979-69036005; SpCas9
tgcggcgtgcggcccgcggcgtg

SEQ ID NO: 49936 - DNA, 22 bp, Artificial Sequence
  Synthetic: FXN 5 reverse 9:69035980-69036005; SpCas9
gcggcgtgcggcccgcggcgtg

SEQ ID NO: 49937 - DNA, 21 bp, Artificial Sequence
  Synthetic: FXN 5 reverse 9:69035981-69036005; SpCas9
cggcgtgcggcccgcggcgtg

SEQ ID NO: 49938 - DNA, 20 bp, Artificial Sequence
  Synthetic: FXN 5 reverse 9:69035982-69036005; SpCas9
ggcgtgcggcccgcggcgtg

SEQ ID NO: 49939 - DNA, 19 bp, Artificial Sequence
  Synthetic: FXN 5 reverse 9:69035983-69036005; SpCas9
gcgtgcggcccgcggcgtg

SEQ ID NO: 49940 - DNA, 18 bp, Artificial Sequence
  Synthetic: FXN 5 reverse 9:69035984-69036005; SpCas9
cgtgcggcccgcggcgtg

SEQ ID NO: 49941 - DNA, 25 bp, Artificial Sequence
  Synthetic: FXN 5 reverse 9:69035984-69036012; SpCas9
gcgcaggcgtgcggcgtgcggcccg

SEQ ID NO: 49942 - DNA, 24 bp, Artificial Sequence
  Synthetic: FXN 5 reverse 9:69035985-69036012; SpCas9
cgcaggcgtgcggcgtgcggcccg

SEQ ID NO: 49943 - DNA, 23 bp, Artificial Sequence
  Synthetic: FXN 5 reverse 9:69035986-69036012; SpCas9
gcaggcgtgcggcgtgcggcccg

SEQ ID NO: 49944 - DNA, 22 bp, Artificial Sequence
  Synthetic: FXN 5 reverse 9:69035987-69036012; SpCas9
caggcgtgcggcgtgcggcccg

SEQ ID NO: 49945 - DNA, 21 bp, Artificial Sequence
  Synthetic: FXN 5 reverse 9:69035988-69036012; SpCas9
aggcgtgcggcgtgcggcccg

SEQ ID NO: 49946 - DNA, 20 bp, Artificial Sequence
  Synthetic: FXN 5 reverse 9:69035989-69036012; SpCas9
ggcgtgcggcgtgcggcccg

SEQ ID NO: 49947 - DNA, 19 bp, Artificial Sequence
  Synthetic: FXN 5 reverse 9:69035990-69036012; SpCas9
gcgtgcggcgtgcggcccg

SEQ ID NO: 49948 - DNA, 18 bp, Artificial Sequence
  Synthetic: FXN 5 reverse 9:69035991-69036012; SpCas9
cgtgcggcgtgcggcccg

SEQ ID NO: 49949 - DNA, 25 bp, Artificial Sequence
  Synthetic: FXN 5 forward 9:69035986-69036014; SpCas9
gcgggccgcacgccgcacgcctgcg

SEQ ID NO: 49950 - DNA, 24 bp, Artificial Sequence
  Synthetic: FXN 5 forward 9:69035987-69036014; SpCas9
cgggccgcacgccgcacgcctgcg

SEQ ID NO: 49951 - DNA, 23 bp, Artificial Sequence
  Synthetic: FXN 5 forward 9:69035988-69036014; SpCas9
gggccgcacgccgcacgcctgcg

SEQ ID NO: 49952 - DNA, 22 bp, Artificial Sequence
  Synthetic: FXN 5 forward 9:69035989-69036014; SpCas9
ggccgcacgccgcacgcctgcg

SEQ ID NO: 49953 - DNA, 21 bp, Artificial Sequence
  Synthetic: FXN 5 forward 9:69035990-69036014; SpCas9
gccgcacgccgcacgcctgcg

SEQ ID NO: 49954 - DNA, 20 bp, Artificial Sequence
  Synthetic: FXN 5 forward 9:69035991-69036014; SpCas9
ccgcacgccgcacgcctgcg

SEQ ID NO: 49955 - DNA, 19 bp, Artificial Sequence
  Synthetic: FXN 5 forward 9:69035992-69036014; SpCas9
cgcacgccgcacgcctgcg

SEQ ID NO: 49956 - DNA, 18 bp, Artificial Sequence
  Synthetic: FXN 5 forward 9:69035993-69036014; SpCas9
gcacgccgcacgcctgcg

SEQ ID NO: 49957 - DNA, 25 bp, Artificial Sequence
  Synthetic: FXN 5 forward 9:69035987-69036015; SpCas9
cgggccgcacgccgcacgcctgcgc

SEQ ID NO: 49958 - DNA, 24 bp, Artificial Sequence
  Synthetic: FXN 5 forward 9:69035988-69036015; SpCas9
gggccgcacgccgcacgcctgcgc

SEQ ID NO: 49959 - DNA, 23 bp, Artificial Sequence
  Synthetic: FXN 5 forward 9:69035989-69036015; SpCas9
ggccgcacgccgcacgcctgcgc

SEQ ID NO: 49960 - DNA, 22 bp, Artificial Sequence
  Synthetic: FXN 5 forward 9:69035990-69036015; SpCas9
gccgcacgccgcacgcctgcgc

SEQ ID NO: 49961 - DNA, 21 bp, Artificial Sequence
  Synthetic: FXN 5 forward 9:69035991-69036015; SpCas9
ccgcacgccgcacgcctgcgc

SEQ ID NO: 49962 - DNA, 20 bp, Artificial Sequence
  Synthetic: FXN 5 forward 9:69035992-69036015; SpCas9
cgcacgccgcacgcctgcgc

SEQ ID NO: 49963 - DNA, 19 bp, Artificial Sequence
  Synthetic: FXN 5 forward 9:69035993-69036015; SpCas9
gcacgccgcacgcctgcgc

SEQ ID NO: 49964 - DNA, 18 bp, Artificial Sequence
  Synthetic: FXN 5 forward 9:69035994-69036015; SpCas9
cacgccgcacgcctgcgc

SEQ ID NO: 49965 - DNA, 25 bp, Artificial Sequence
  Synthetic: FXN 5 forward 9:69035988-69036016; SpCas9
gggccgcacgccgcacgcctgcgca

SEQ ID NO: 49966 - DNA, 24 bp, Artificial Sequence
  Synthetic: FXN 5 forward 9:69035989-69036016; SpCas9
ggccgcacgccgcacgcctgcgca

SEQ ID NO: 49967 - DNA, 23 bp, Artificial Sequence
  Synthetic: FXN 5 forward 9:69035990-69036016; SpCas9
gccgcacgccgcacgcctgcgca

SEQ ID NO: 49968 - DNA, 22 bp, Artificial Sequence
  Synthetic: FXN 5 forward 9:69035991-69036016; SpCas9
ccgcacgccgcacgcctgcgca

SEQ ID NO: 49969 - DNA, 21 bp, Artificial Sequence
  Synthetic: FXN 5 forward 9:69035992-69036016; SpCas9
cgcacgccgcacgcctgcgca

SEQ ID NO: 49970 - DNA, 20 bp, Artificial Sequence
  Synthetic: FXN 5 forward 9:69035993-69036016; SpCas9
gcacgccgcacgcctgcgca

SEQ ID NO: 49971 - DNA, 19 bp, Artificial Sequence
  Synthetic: FXN 5 forward 9:69035994-69036016; SpCas9
cacgccgcacgcctgcgca

SEQ ID NO: 49972 - DNA, 18 bp, Artificial Sequence
  Synthetic: FXN 5 forward 9:69035995-69036016; SpCas9
acgccgcacgcctgcgca

SEQ ID NO: 49973 - DNA, 25 bp, Artificial Sequence
  Synthetic: FXN 5 forward 9:69035990-69036018; SpCas9
gccgcacgccgcacgcctgcgcagg

SEQ ID NO: 49974 - DNA, 24 bp, Artificial Sequence
  Synthetic: FXN 5 forward 9:69035991-69036018; SpCas9
ccgcacgccgcacgcctgcgcagg

SEQ ID NO: 49975 - DNA, 23 bp, Artificial Sequence
  Synthetic: FXN 5 forward 9:69035992-69036018; SpCas9
cgcacgccgcacgcctgcgcagg

SEQ ID NO: 49976 - DNA, 22 bp, Artificial Sequence
  Synthetic: FXN 5 forward 9:69035993-69036018; SpCas9
gcacgccgcacgcctgcgcagg

SEQ ID NO: 49977 - DNA, 21 bp, Artificial Sequence
  Synthetic: FXN 5 forward 9:69035994-69036018; SpCas9
cacgccgcacgcctgcgcagg

SEQ ID NO: 49978 - DNA, 20 bp, Artificial Sequence
  Synthetic: FXN 5 forward 9:69035995-69036018; SpCas9
acgccgcacgcctgcgcagg

SEQ ID NO: 49979 - DNA, 19 bp, Artificial Sequence
  Synthetic: FXN 5 forward 9:69035996-69036018; SpCas9
cgccgcacgcctgcgcagg

SEQ ID NO: 49980 - DNA, 18 bp, Artificial Sequence
  Synthetic: FXN 5 forward 9:69035997-69036018; SpCas9
gccgcacgcctgcgcagg

SEQ ID NO: 49981 - DNA, 25 bp, Artificial Sequence
  Synthetic: FXN 5 forward 9:69035991-69036019; SpCas9
ccgcacgccgcacgcctgcgcaggg

SEQ ID NO: 49982 - DNA, 24 bp, Artificial Sequence
  Synthetic: FXN 5 forward 9:69035992-69036019; SpCas9
cgcacgccgcacgcctgcgcaggg

SEQ ID NO: 49983 - DNA, 23 bp, Artificial Sequence
  Synthetic: FXN 5 forward 9:69035993-69036019; SpCas9
gcacgccgcacgcctgcgcaggg

SEQ ID NO: 49984 - DNA, 22 bp, Artificial Sequence
  Synthetic: FXN 5 forward 9:69035994-69036019; SpCas9
cacgccgcacgcctgcgcaggg

SEQ ID NO: 49985 - DNA, 21 bp, Artificial Sequence
  Synthetic: FXN 5 forward 9:69035995-69036019; SpCas9
acgccgcacgcctgcgcaggg

SEQ ID NO: 49986 - DNA, 20 bp, Artificial Sequence
  Synthetic: FXN 5 forward 9:69035996-69036019; SpCas9
cgccgcacgcctgcgcaggg

SEQ ID NO: 49987 - DNA, 19 bp, Artificial Sequence
  Synthetic: FXN 5 forward 9:69035997-69036019; SpCas9
gccgcacgcctgcgcaggg

SEQ ID NO: 49988 - DNA, 18 bp, Artificial Sequence
  Synthetic: FXN 5 forward 9:69035998-69036019; SpCas9
ccgcacgcctgcgcaggg

SEQ ID NO: 49989 - DNA, 25 bp, Artificial Sequence
  Synthetic: FXN 5 reverse 9:69035991-69036019; SpCas9
cctccctgcgcaggcgtgcggcgtg

SEQ ID NO: 49990 - DNA, 24 bp, Artificial Sequence
  Synthetic: FXN 5 reverse 9:69035992-69036019; SpCas9
ctccctgcgcaggcgtgcggcgtg

SEQ ID NO: 49991 - DNA, 23 bp, Artificial Sequence
  Synthetic: FXN 5 reverse 9:69035993-69036019; SpCas9
tccctgcgcaggcgtgcggcgtg

SEQ ID NO: 49992 - DNA, 22 bp, Artificial Sequence
  Synthetic: FXN 5 reverse 9:69035994-69036019; SpCas9
ccctgcgcaggcgtgcggcgtg

SEQ ID NO: 49993 - DNA, 21 bp, Artificial Sequence
  Synthetic: FXN 5 reverse 9:69035995-69036019; SpCas9
cctgcgcaggcgtgcggcgtg

SEQ ID NO: 49994 - DNA, 20 bp, Artificial Sequence
  Synthetic: FXN 5 reverse 9:69035996-69036019; SpCas9
ctgcgcaggcgtgcggcgtg

SEQ ID NO: 49995 - DNA, 19 bp, Artificial Sequence
  Synthetic: FXN 5 reverse 9:69035997-69036019; SpCas9
tgcgcaggcgtgcggcgtg

SEQ ID NO: 49996 - DNA, 18 bp, Artificial Sequence
  Synthetic: FXN 5 reverse 9:69035998-69036019; SpCas9
gcgcaggcgtgcggcgtg

SEQ ID NO: 49997 - DNA, 25 bp, Artificial Sequence
  Synthetic: FXN 5 reverse 9:69035998-69036026; SpCas9
cgcggcgcctccctgcgcaggcgtg

SEQ ID NO: 49998 - DNA, 24 bp, Artificial Sequence
  Synthetic: FXN 5 reverse 9:69035999-69036026; SpCas9
gcggcgcctccctgcgcaggcgtg

SEQ ID NO: 49999 - DNA, 23 bp, Artificial Sequence
  Synthetic: FXN 5 reverse 9:69036000-69036026; SpCas9
cggcgcctccctgcgcaggcgtg

SEQ ID NO: 50000 - DNA, 22 bp, Artificial Sequence
  Synthetic: FXN 5 reverse 9:69036001-69036026; SpCas9
ggcgcctccctgcgcaggcgtg

SEQ ID NO: 50001 - DNA, 21 bp, Artificial Sequence
  Synthetic: FXN 5 reverse 9:69036002-69036026; SpCas9
gcgcctccctgcgcaggcgtg

SEQ ID NO: 50002 - DNA, 20 bp, Artificial Sequence
  Synthetic: FXN 5 reverse 9:69036003-69036026; SpCas9
cgcctccctgcgcaggcgtg

SEQ ID NO: 50003 - DNA, 19 bp, Artificial Sequence
  Synthetic: FXN 5 reverse 9:69036004-69036026; SpCas9
gcctccctgcgcaggcgtg

SEQ ID NO: 50004 - DNA, 18 bp, Artificial Sequence
  Synthetic: FXN 5 reverse 9:69036005-69036026; SpCas9
cctccctgcgcaggcgtg

SEQ ID NO: 50005 - DNA, 25 bp, Artificial Sequence
  Synthetic: FXN 5 reverse 9:69036005-69036033; SpCas9
cggcgtgcgcggcgcctccctgcgc

SEQ ID NO: 50006 - DNA, 24 bp, Artificial Sequence
  Synthetic: FXN 5 reverse 9:69036006-69036033; SpCas9
ggcgtgcgcggcgcctccctgcgc

SEQ ID NO: 50007 - DNA, 23 bp, Artificial Sequence
  Synthetic: FXN 5 reverse 9:69036007-69036033; SpCas9
gcgtgcgcggcgcctccctgcgc

SEQ ID NO: 50008 - DNA, 22 bp, Artificial Sequence
  Synthetic: FXN 5 reverse 9:69036008-69036033; SpCas9
cgtgcgcggcgcctccctgcgc

SEQ ID NO: 50009 - DNA, 21 bp, Artificial Sequence
  Synthetic: FXN 5 reverse 9:69036009-69036033; SpCas9
gtgcgcggcgcctccctgcgc

SEQ ID NO: 50010 - DNA, 20 bp, Artificial Sequence
  Synthetic: FXN 5 reverse 9:69036010-69036033; SpCas9
tgcgcggcgcctccctgcgc

SEQ ID NO: 50011 - DNA, 19 bp, Artificial Sequence
  Synthetic: FXN 5 reverse 9:69036011-69036033; SpCas9
gcgcggcgcctccctgcgc

SEQ ID NO: 50012 - DNA, 18 bp, Artificial Sequence
  Synthetic: FXN 5 reverse 9:69036012-69036033; SpCas9
cgcggcgcctccctgcgc

SEQ ID NO: 50013 - DNA, 25 bp, Artificial Sequence
  Synthetic: FXN 5 forward 9:69036006-69036034; SpCas9
ctgcgcagggaggcgccgcgcacgc

SEQ ID NO: 50014 - DNA, 24 bp, Artificial Sequence
  Synthetic: FXN 5 forward 9:69036007-69036034; SpCas9
tgcgcagggaggcgccgcgcacgc

SEQ ID NO: 50015 - DNA, 23 bp, Artificial Sequence
  Synthetic: FXN 5 forward 9:69036008-69036034; SpCas9
gcgcagggaggcgccgcgcacgc

SEQ ID NO: 50016 - DNA, 22 bp, Artificial Sequence
  Synthetic: FXN 5 forward 9:69036009-69036034; SpCas9
cgcagggaggcgccgcgcacgc

SEQ ID NO: 50017 - DNA, 21 bp, Artificial Sequence
  Synthetic: FXN 5 forward 9:69036010-69036034; SpCas9
gcagggaggcgccgcgcacgc

SEQ ID NO: 50018 - DNA, 20 bp, Artificial Sequence
  Synthetic: FXN 5 forward 9:69036011-69036034; SpCas9
cagggaggcgccgcgcacgc

SEQ ID NO: 50019 - DNA, 19 bp, Artificial Sequence
  Synthetic: FXN 5 forward 9:69036012-69036034; SpCas9
agggaggcgccgcgcacgc

SEQ ID NO: 50020 - DNA, 18 bp, Artificial Sequence
  Synthetic: FXN 5 forward 9:69036013-69036034; SpCas9
gggaggcgccgcgcacgc

SEQ ID NO: 50021 - DNA, 25 bp, Artificial Sequence
  Synthetic: FXN 5 reverse 9:69036006-69036034; SpCas9
ccggcgtgcgcggcgcctccctgcg

SEQ ID NO: 50022 - DNA, 24 bp, Artificial Sequence
  Synthetic: FXN 5 reverse 9:69036007-69036034; SpCas9
cggcgtgcgcggcgcctccctgcg

SEQ ID NO: 50023 - DNA, 23 bp, Artificial Sequence
  Synthetic: FXN 5 reverse 9:69036008-69036034; SpCas9
ggcgtgcgcggcgcctccctgcg

SEQ ID NO: 50024 - DNA, 22 bp, Artificial Sequence
  Synthetic: FXN 5 reverse 9:69036009-69036034; SpCas9
gcgtgcgcggcgcctccctgcg

SEQ ID NO: 50025 - DNA, 21 bp, Artificial Sequence
  Synthetic: FXN 5 reverse 9:69036010-69036034; SpCas9
cgtgcgcggcgcctccctgcg

SEQ ID NO: 50026 - DNA, 20 bp, Artificial Sequence
  Synthetic: FXN 5 reverse 9:69036011-69036034; SpCas9
gtgcgcggcgcctccctgcg

SEQ ID NO: 50027 - DNA, 19 bp, Artificial Sequence
  Synthetic: FXN 5 reverse 9:69036012-69036034; SpCas9
tgcgcggcgcctccctgcg

SEQ ID NO: 50028 - DNA, 18 bp, Artificial Sequence
  Synthetic: FXN 5 reverse 9:69036013-69036034; SpCas9
gcgcggcgcctccctgcg

SEQ ID NO: 50029 - DNA, 25 bp, Artificial Sequence
  Synthetic: FXN 5 forward 9:69036007-69036035; SpCas9
tgcgcagggaggcgccgcgcacgcc

SEQ ID NO: 50030 - DNA, 24 bp, Artificial Sequence
  Synthetic: FXN 5 forward 9:69036008-69036035; SpCas9
gcgcagggaggcgccgcgcacgcc

SEQ ID NO: 50031 - DNA, 23 bp, Artificial Sequence
  Synthetic: FXN 5 forward 9:69036009-69036035; SpCas9
cgcagggaggcgccgcgcacgcc

SEQ ID NO: 50032 - DNA, 22 bp, Artificial Sequence
  Synthetic: FXN 5 forward 9:69036010-69036035; SpCas9
gcagggaggcgccgcgcacgcc

SEQ ID NO: 50033 - DNA, 21 bp, Artificial Sequence
  Synthetic: FXN 5 forward 9:69036011-69036035; SpCas9
cagggaggcgccgcgcacgcc

SEQ ID NO: 50034 - DNA, 20 bp, Artificial Sequence
  Synthetic: FXN 5 forward 9:69036012-69036035; SpCas9
agggaggcgccgcgcacgcc

SEQ ID NO: 50035 - DNA, 19 bp, Artificial Sequence
  Synthetic: FXN 5 forward 9:69036013-69036035; SpCas9
gggaggcgccgcgcacgcc

SEQ ID NO: 50036 - DNA, 18 bp, Artificial Sequence
  Synthetic: FXN 5 forward 9:69036014-69036035; SpCas9
ggaggcgccgcgcacgcc

SEQ ID NO: 50037 - DNA, 25 bp, Artificial Sequence
  Synthetic: FXN 5 forward 9:69036008-69036036; SpCas9
gcgcagggaggcgccgcgcacgccg

SEQ ID NO: 50038 - DNA, 24 bp, Artificial Sequence
  Synthetic: FXN 5 forward 9:69036009-69036036; SpCas9
cgcagggaggcgccgcgcacgccg

SEQ ID NO: 50039 - DNA, 23 bp, Artificial Sequence
  Synthetic: FXN 5 forward 9:69036010-69036036; SpCas9
gcagggaggcgccgcgcacgccg

SEQ ID NO: 50040 - DNA, 22 bp, Artificial Sequence
  Synthetic: FXN 5 forward 9:69036011-69036036; SpCas9
cagggaggcgccgcgcacgccg

SEQ ID NO: 50041 - DNA, 21 bp, Artificial Sequence
  Synthetic: FXN 5 forward 9:69036012-69036036; SpCas9
agggaggcgccgcgcacgccg

SEQ ID NO: 50042 - DNA, 20 bp, Artificial Sequence
  Synthetic: FXN 5 forward 9:69036013-69036036; SpCas9
gggaggcgccgcgcacgccg

SEQ ID NO: 50043 - DNA, 19 bp, Artificial Sequence
  Synthetic: FXN 5 forward 9:69036014-69036036; SpCas9
ggaggcgccgcgcacgccg

SEQ ID NO: 50044 - DNA, 18 bp, Artificial Sequence
  Synthetic: FXN 5 forward 9:69036015-69036036; SpCas9
gaggcgccgcgcacgccg

SEQ ID NO: 50045 - DNA, 25 bp, Artificial Sequence
  Synthetic: FXN 5 forward 9:69036017-69036045; SpCas9
ggcgccgcgcacgccggggtcgctc

SEQ ID NO: 50046 - DNA, 24 bp, Artificial Sequence
  Synthetic: FXN 5 forward 9:69036018-69036045; SpCas9
gcgccgcgcacgccggggtcgctc

SEQ ID NO: 50047 - DNA, 23 bp, Artificial Sequence
  Synthetic: FXN 5 forward 9:69036019-69036045; SpCas9
cgccgcgcacgccggggtcgctc

SEQ ID NO: 50048 - DNA, 22 bp, Artificial Sequence
  Synthetic: FXN 5 forward 9:69036020-69036045; SpCas9
gccgcgcacgccggggtcgctc

SEQ ID NO: 50049 - DNA, 21 bp, Artificial Sequence
  Synthetic: FXN 5 forward 9:69036021-69036045; SpCas9
ccgcgcacgccggggtcgctc

SEQ ID NO: 50050 - DNA, 20 bp, Artificial Sequence
  Synthetic: FXN 5 forward 9:69036022-69036045; SpCas9
cgcgcacgccggggtcgctc

SEQ ID NO: 50051 - DNA, 19 bp, Artificial Sequence
  Synthetic: FXN 5 forward 9:69036023-69036045; SpCas9
gcgcacgccggggtcgctc

SEQ ID NO: 50052 - DNA, 18 bp, Artificial Sequence
  Synthetic: FXN 5 forward 9:69036024-69036045; SpCas9
cgcacgccggggtcgctc

SEQ ID NO: 50053 - DNA, 25 bp, Artificial Sequence
  Synthetic: FXN 5 forward 9:69036018-69036046; SpCas9
gcgccgcgcacgccggggtcgctcc

SEQ ID NO: 50054 - DNA, 24 bp, Artificial Sequence
  Synthetic: FXN 5 forward 9:69036019-69036046; SpCas9
cgccgcgcacgccggggtcgctcc

SEQ ID NO: 50055 - DNA, 23 bp, Artificial Sequence
  Synthetic: FXN 5 forward 9:69036020-69036046; SpCas9
gccgcgcacgccggggtcgctcc

SEQ ID NO: 50056 - DNA, 22 bp, Artificial Sequence
  Synthetic: FXN 5 forward 9:69036021-69036046; SpCas9
ccgcgcacgccggggtcgctcc

SEQ ID NO: 50057 - DNA, 21 bp, Artificial Sequence
  Synthetic: FXN 5 forward 9:69036022-69036046; SpCas9
cgcgcacgccggggtcgctcc

SEQ ID NO: 50058 - DNA, 20 bp, Artificial Sequence
  Synthetic: FXN 5 forward 9:69036023-69036046; SpCas9
gcgcacgccggggtcgctcc

SEQ ID NO: 50059 - DNA, 19 bp, Artificial Sequence
  Synthetic: FXN 5 forward 9:69036024-69036046; SpCas9
cgcacgccggggtcgctcc

SEQ ID NO: 50060 - DNA, 18 bp, Artificial Sequence
  Synthetic: FXN 5 forward 9:69036025-69036046; SpCas9
gcacgccggggtcgctcc

SEQ ID NO: 50061 - DNA, 25 bp, Artificial Sequence
  Synthetic: FXN 5 reverse 9:69036021-69036049; SpCas9
gtacccggagcgaccccggcgtgcg

SEQ ID NO: 50062 - DNA, 24 bp, Artificial Sequence
  Synthetic: FXN 5 reverse 9:69036022-69036049; SpCas9
tacccggagcgaccccggcgtgcg

SEQ ID NO: 50063 - DNA, 23 bp, Artificial Sequence
  Synthetic: FXN 5 reverse 9:69036023-69036049; SpCas9
acccggagcgaccccggcgtgcg

SEQ ID NO: 50064 - DNA, 22 bp, Artificial Sequence
  Synthetic: FXN 5 reverse 9:69036024-69036049; SpCas9
cccggagcgaccccggcgtgcg

SEQ ID NO: 50065 - DNA, 21 bp, Artificial Sequence
  Synthetic: FXN 5 reverse 9:69036025-69036049; SpCas9
ccggagcgaccccggcgtgcg

SEQ ID NO: 50066 - DNA, 20 bp, Artificial Sequence
  Synthetic: FXN 5 reverse 9:69036026-69036049; SpCas9
cggagcgaccccggcgtgcg

SEQ ID NO: 50067 - DNA, 19 bp, Artificial Sequence
  Synthetic: FXN 5 reverse 9:69036027-69036049; SpCas9
ggagcgaccccggcgtgcg

SEQ ID NO: 50068 - DNA, 18 bp, Artificial Sequence
  Synthetic: FXN 5 reverse 9:69036028-69036049; SpCas9
gagcgaccccggcgtgcg

SEQ ID NO: 50069 - DNA, 25 bp, Artificial Sequence
  Synthetic: FXN 5 forward 9:69036030-69036058; SpCas9
ccggggtcgctccgggtacgcgcgc

SEQ ID NO: 50070 - DNA, 24 bp, Artificial Sequence
  Synthetic: FXN 5 forward 9:69036031-69036058; SpCas9
cggggtcgctccgggtacgcgcgc

SEQ ID NO: 50071 - DNA, 23 bp, Artificial Sequence
  Synthetic: FXN 5 forward 9:69036032-69036058; SpCas9
ggggtcgctccgggtacgcgcgc

SEQ ID NO: 50072 - DNA, 22 bp, Artificial Sequence
  Synthetic: FXN 5 forward 9:69036033-69036058; SpCas9
gggtcgctccgggtacgcgcgc

SEQ ID NO: 50073 - DNA, 21 bp, Artificial Sequence
  Synthetic: FXN 5 forward 9:69036034-69036058; SpCas9
ggtcgctccgggtacgcgcgc

SEQ ID NO: 50074 - DNA, 20 bp, Artificial Sequence
  Synthetic: FXN 5 forward 9:69036035-69036058; SpCas9
gtcgctccgggtacgcgcgc

SEQ ID NO: 50075 - DNA, 19 bp, Artificial Sequence
  Synthetic: FXN 5 forward 9:69036036-69036058; SpCas9
tcgctccgggtacgcgcgc

SEQ ID NO: 50076 - DNA, 18 bp, Artificial Sequence
  Synthetic: FXN 5 forward 9:69036037-69036058; SpCas9
cgctccgggtacgcgcgc

SEQ ID NO: 50077 - DNA, 25 bp, Artificial Sequence
  Synthetic: FXN 5 reverse 9:69036030-69036058; SpCas9
ccagcgcgcgtacccggagcgaccc

SEQ ID NO: 50078 - DNA, 24 bp, Artificial Sequence
  Synthetic: FXN 5 reverse 9:69036031-69036058; SpCas9
cagcgcgcgtacccggagcgaccc

SEQ ID NO: 50079 - DNA, 23 bp, Artificial Sequence
  Synthetic: FXN 5 reverse 9:69036032-69036058; SpCas9
agcgcgcgtacccggagcgaccc

SEQ ID NO: 50080 - DNA, 22 bp, Artificial Sequence
  Synthetic: FXN 5 reverse 9:69036033-69036058; SpCas9
gcgcgcgtacccggagcgaccc

SEQ ID NO: 50081 - DNA, 21 bp, Artificial Sequence
  Synthetic: FXN 5 reverse 9:69036034-69036058; SpCas9
cgcgcgtacccggagcgaccc

SEQ ID NO: 50082 - DNA, 20 bp, Artificial Sequence
  Synthetic: FXN 5 reverse 9:69036035-69036058; SpCas9
gcgcgtacccggagcgaccc

SEQ ID NO: 50083 - DNA, 19 bp, Artificial Sequence
  Synthetic: FXN 5 reverse 9:69036036-69036058; SpCas9
cgcgtacccggagcgaccc

SEQ ID NO: 50084 - DNA, 18 bp, Artificial Sequence
  Synthetic: FXN 5 reverse 9:69036037-69036058; SpCas9
gcgtacccggagcgaccc

SEQ ID NO: 50085 - DNA, 25 bp, Artificial Sequence
  Synthetic: FXN 5 forward 9:69036035-69036063; SpCas9
gtcgctccgggtacgcgcgctggac

SEQ ID NO: 50086 - DNA, 24 bp, Artificial Sequence
  Synthetic: FXN 5 forward 9:69036036-69036063; SpCas9
tcgctccgggtacgcgcgctggac

SEQ ID NO: 50087 - DNA, 23 bp, Artificial Sequence
  Synthetic: FXN 5 forward 9:69036037-69036063; SpCas9
cgctccgggtacgcgcgctggac

SEQ ID NO: 50088 - DNA, 22 bp, Artificial Sequence
  Synthetic: FXN 5 forward 9:69036038-69036063; SpCas9
gctccgggtacgcgcgctggac

SEQ ID NO: 50089 - DNA, 21 bp, Artificial Sequence
  Synthetic: FXN 5 forward 9:69036039-69036063; SpCas9
ctccgggtacgcgcgctggac

SEQ ID NO: 50090 - DNA, 20 bp, Artificial Sequence
  Synthetic: FXN 5 forward 9:69036040-69036063; SpCas9
tccgggtacgcgcgctggac

SEQ ID NO: 50091 - DNA, 19 bp, Artificial Sequence
  Synthetic: FXN 5 forward 9:69036041-69036063; SpCas9
ccgggtacgcgcgctggac

SEQ ID NO: 50092 - DNA, 18 bp, Artificial Sequence
  Synthetic: FXN 5 forward 9:69036042-69036063; SpCas9
cgggtacgcgcgctggac

SEQ ID NO: 50093 - DNA, 25 bp, Artificial Sequence
  Synthetic: FXN 5 reverse 9:69036039-69036067; SpCas9
tgagctagtccagcgcgcgtacccg

SEQ ID NO: 50094 - DNA, 24 bp, Artificial Sequence
  Synthetic: FXN 5 reverse 9:69036040-69036067; SpCas9
gagctagtccagcgcgcgtacccg

SEQ ID NO: 50095 - DNA, 23 bp, Artificial Sequence
  Synthetic: FXN 5 reverse 9:69036041-69036067; SpCas9
agctagtccagcgcgcgtacccg

SEQ ID NO: 50096 - DNA, 22 bp, Artificial Sequence
  Synthetic: FXN 5 reverse 9:69036042-69036067; SpCas9
gctagtccagcgcgcgtacccg

SEQ ID NO: 50097 - DNA, 21 bp, Artificial Sequence
  Synthetic: FXN 5 reverse 9:69036043-69036067; SpCas9
ctagtccagcgcgcgtacccg

SEQ ID NO: 50098 - DNA, 20 bp, Artificial Sequence
  Synthetic: FXN 5 reverse 9:69036044-69036067; SpCas9
tagtccagcgcgcgtacccg

SEQ ID NO: 50099 - DNA, 19 bp, Artificial Sequence
  Synthetic: FXN 5 reverse 9:69036045-69036067; SpCas9
agtccagcgcgcgtacccg

SEQ ID NO: 50100 - DNA, 18 bp, Artificial Sequence
  Synthetic: FXN 5 reverse 9:69036046-69036067; SpCas9
gtccagcgcgcgtacccg

SEQ ID NO: 50101 - DNA, 25 bp, Artificial Sequence
  Synthetic: FXN 5 reverse 9:69036041-69036069; SpCas9
ggtgagctagtccagcgcgcgtacc

SEQ ID NO: 50102 - DNA, 24 bp, Artificial Sequence
  Synthetic: FXN 5 reverse 9:69036042-69036069; SpCas9
gtgagctagtccagcgcgcgtacc

SEQ ID NO: 50103 - DNA, 23 bp, Artificial Sequence
  Synthetic: FXN 5 reverse 9:69036043-69036069; SpCas9
tgagctagtccagcgcgcgtacc

SEQ ID NO: 50104 - DNA, 22 bp, Artificial Sequence
  Synthetic: FXN 5 reverse 9:69036044-69036069; SpCas9
gagctagtccagcgcgcgtacc

SEQ ID NO: 50105 - DNA, 21 bp, Artificial Sequence
  Synthetic: FXN 5 reverse 9:69036045-69036069; SpCas9
agctagtccagcgcgcgtacc

SEQ ID NO: 50106 - DNA, 20 bp, Artificial Sequence
  Synthetic: FXN 5 reverse 9:69036046-69036069; SpCas9
gctagtccagcgcgcgtacc

SEQ ID NO: 50107 - DNA, 19 bp, Artificial Sequence
  Synthetic: FXN 5 reverse 9:69036047-69036069; SpCas9
ctagtccagcgcgcgtacc

SEQ ID NO: 50108 - DNA, 18 bp, Artificial Sequence
  Synthetic: FXN 5 reverse 9:69036048-69036069; SpCas9
tagtccagcgcgcgtacc

SEQ ID NO: 50109 - DNA, 25 bp, Artificial Sequence
  Synthetic: FXN 5 reverse 9:69036054-69036082; SpCas9
tgagaaggagcggggtgagctagtc

SEQ ID NO: 50110 - DNA, 24 bp, Artificial Sequence
  Synthetic: FXN 5 reverse 9:69036055-69036082; SpCas9
gagaaggagcggggtgagctagtc

SEQ ID NO: 50111 - DNA, 23 bp, Artificial Sequence
  Synthetic: FXN 5 reverse 9:69036056-69036082; SpCas9
agaaggagcggggtgagctagtc

SEQ ID NO: 50112 - DNA, 22 bp, Artificial Sequence
  Synthetic: FXN 5 reverse 9:69036057-69036082; SpCas9
gaaggagcggggtgagctagtc

SEQ ID NO: 50113 - DNA, 21 bp, Artificial Sequence
  Synthetic: FXN 5 reverse 9:69036058-69036082; SpCas9
aaggagcggggtgagctagtc

SEQ ID NO: 50114 - DNA, 20 bp, Artificial Sequence
  Synthetic: FXN 5 reverse 9:69036059-69036082; SpCas9
aggagcggggtgagctagtc

SEQ ID NO: 50115 - DNA, 19 bp, Artificial Sequence
  Synthetic: FXN 5 reverse 9:69036060-69036082; SpCas9
ggagcggggtgagctagtc

SEQ ID NO: 50116 - DNA, 18 bp, Artificial Sequence
  Synthetic: FXN 5 reverse 9:69036061-69036082; SpCas9
gagcggggtgagctagtc

SEQ ID NO: 50117 - DNA, 25 bp, Artificial Sequence
  Synthetic: FXN 5 forward 9:69036055-69036083; SpCas9
tggactagctcaccccgctccttct

SEQ ID NO: 50118 - DNA, 24 bp, Artificial Sequence
  Synthetic: FXN 5 forward 9:69036056-69036083; SpCas9
ggactagctcaccccgctccttct

SEQ ID NO: 50119 - DNA, 23 bp, Artificial Sequence
  Synthetic: FXN 5 forward 9:69036057-69036083; SpCas9
gactagctcaccccgctccttct

SEQ ID NO: 50120 - DNA, 22 bp, Artificial Sequence
  Synthetic: FXN 5 forward 9:69036058-69036083; SpCas9
actagctcaccccgctccttct

SEQ ID NO: 50121 - DNA, 21 bp, Artificial Sequence
  Synthetic: FXN 5 forward 9:69036059-69036083; SpCas9
ctagctcaccccgctccttct

SEQ ID NO: 50122 - DNA, 20 bp, Artificial Sequence
  Synthetic: FXN 5 forward 9:69036060-69036083; SpCas9
tagctcaccccgctccttct

SEQ ID NO: 50123 - DNA, 19 bp, Artificial Sequence
  Synthetic: FXN 5 forward 9:69036061-69036083; SpCas9
agctcaccccgctccttct

SEQ ID NO: 50124 - DNA, 18 bp, Artificial Sequence
  Synthetic: FXN 5 forward 9:69036062-69036083; SpCas9
gctcaccccgctccttct

SEQ ID NO: 50125 - DNA, 25 bp, Artificial Sequence
  Synthetic: FXN 5 forward 9:69036056-69036084; SpCas9
ggactagctcaccccgctccttctc

SEQ ID NO: 50126 - DNA, 24 bp, Artificial Sequence
  Synthetic: FXN 5 forward 9:69036057-69036084; SpCas9
gactagctcaccccgctccttctc

SEQ ID NO: 50127 - DNA, 23 bp, Artificial Sequence
  Synthetic: FXN 5 forward 9:69036058-69036084; SpCas9
actagctcaccccgctccttctc

SEQ ID NO: 50128 - DNA, 22 bp, Artificial Sequence
  Synthetic: FXN 5 forward 9:69036059-69036084; SpCas9
ctagctcaccccgctccttctc

SEQ ID NO: 50129 - DNA, 21 bp, Artificial Sequence
  Synthetic: FXN 5 forward 9:69036060-69036084; SpCas9
tagctcaccccgctccttctc

SEQ ID NO: 50130 - DNA, 20 bp, Artificial Sequence
  Synthetic: FXN 5 forward 9:69036061-69036084; SpCas9
agctcaccccgctccttctc

SEQ ID NO: 50131 - DNA, 19 bp, Artificial Sequence
  Synthetic: FXN 5 forward 9:69036062-69036084; SpCas9
gctcaccccgctccttctc

SEQ ID NO: 50132 - DNA, 18 bp, Artificial Sequence
  Synthetic: FXN 5 forward 9:69036063-69036084; SpCas9
ctcaccccgctccttctc

SEQ ID NO: 50133 - DNA, 25 bp, Artificial Sequence
  Synthetic: FXN 5 forward 9:69036057-69036085; SpCas9
gactagctcaccccgctccttctca

SEQ ID NO: 50134 - DNA, 24 bp, Artificial Sequence
  Synthetic: FXN 5 forward 9:69036058-69036085; SpCas9
actagctcaccccgctccttctca

SEQ ID NO: 50135 - DNA, 23 bp, Artificial Sequence
  Synthetic: FXN 5 forward 9:69036059-69036085; SpCas9
ctagctcaccccgctccttctca

SEQ ID NO: 50136 - DNA, 22 bp, Artificial Sequence
  Synthetic: FXN 5 forward 9:69036060-69036085; SpCas9
tagctcaccccgctccttctca

SEQ ID NO: 50137 - DNA, 21 bp, Artificial Sequence
  Synthetic: FXN 5 forward 9:69036061-69036085; SpCas9
agctcaccccgctccttctca

SEQ ID NO: 50138 - DNA, 20 bp, Artificial Sequence
  Synthetic: FXN 5 forward 9:69036062-69036085; SpCas9
gctcaccccgctccttctca

SEQ ID NO: 50139 - DNA, 19 bp, Artificial Sequence
  Synthetic: FXN 5 forward 9:69036063-69036085; SpCas9
ctcaccccgctccttctca

SEQ ID NO: 50140 - DNA, 18 bp, Artificial Sequence
  Synthetic: FXN 5 forward 9:69036064-69036085; SpCas9
tcaccccgctccttctca

SEQ ID NO: 50141 - DNA, 25 bp, Artificial Sequence
  Synthetic: FXN 5 reverse 9:69036059-69036087; SpCas9
cgccctgagaaggagcggggtgagc

SEQ ID NO: 50142 - DNA, 24 bp, Artificial Sequence
  Synthetic: FXN 5 reverse 9:69036060-69036087; SpCas9
gccctgagaaggagcggggtgagc

SEQ ID NO: 50143 - DNA, 23 bp, Artificial Sequence
  Synthetic: FXN 5 reverse 9:69036061-69036087; SpCas9
ccctgagaaggagcggggtgagc

SEQ ID NO: 50144 - DNA, 22 bp, Artificial Sequence
  Synthetic: FXN 5 reverse 9:69036062-69036087; SpCas9
cctgagaaggagcggggtgagc

SEQ ID NO: 50145 - DNA, 21 bp, Artificial Sequence
  Synthetic: FXN 5 reverse 9:69036063-69036087; SpCas9
ctgagaaggagcggggtgagc

SEQ ID NO: 50146 - DNA, 20 bp, Artificial Sequence
  Synthetic: FXN 5 reverse 9:69036064-69036087; SpCas9
tgagaaggagcggggtgagc

SEQ ID NO: 50147 - DNA, 19 bp, Artificial Sequence
  Synthetic: FXN 5 reverse 9:69036065-69036087; SpCas9
gagaaggagcggggtgagc

SEQ ID NO: 50148 - DNA, 18 bp, Artificial Sequence
  Synthetic: FXN 5 reverse 9:69036066-69036087; SpCas9
agaaggagcggggtgagc

SEQ ID NO: 50149 - DNA, 25 bp, Artificial Sequence
  Synthetic: FXN 5 forward 9:69036060-69036088; SpCas9
tagctcaccccgctccttctcaggg

SEQ ID NO: 50150 - DNA, 24 bp, Artificial Sequence
  Synthetic: FXN 5 forward 9:69036061-69036088; SpCas9
agctcaccccgctccttctcaggg

SEQ ID NO: 50151 - DNA, 23 bp, Artificial Sequence
  Synthetic: FXN 5 forward 9:69036062-69036088; SpCas9
gctcaccccgctccttctcaggg

SEQ ID NO: 50152 - DNA, 22 bp, Artificial Sequence
  Synthetic: FXN 5 forward 9:69036063-69036088; SpCas9
ctcaccccgctccttctcaggg

SEQ ID NO: 50153 - DNA, 21 bp, Artificial Sequence
  Synthetic: FXN 5 forward 9:69036064-69036088; SpCas9
tcaccccgctccttctcaggg

SEQ ID NO: 50154 - DNA, 20 bp, Artificial Sequence
  Synthetic: FXN 5 forward 9:69036065-69036088; SpCas9
caccccgctccttctcaggg

SEQ ID NO: 50155 - DNA, 19 bp, Artificial Sequence
  Synthetic: FXN 5 forward 9:69036066-69036088; SpCas9
accccgctccttctcaggg

SEQ ID NO: 50156 - DNA, 18 bp, Artificial Sequence
  Synthetic: FXN 5 forward 9:69036067-69036088; SpCas9
ccccgctccttctcaggg

SEQ ID NO: 50157 - DNA, 25 bp, Artificial Sequence
  Synthetic: FXN 5 reverse 9:69036063-69036091; SpCas9
gggccgccctgagaaggagcggggt

SEQ ID NO: 50158 - DNA, 24 bp, Artificial Sequence
  Synthetic: FXN 5 reverse 9:69036064-69036091; SpCas9
ggccgccctgagaaggagcggggt

SEQ ID NO: 50159 - DNA, 23 bp, Artificial Sequence
  Synthetic: FXN 5 reverse 9:69036065-69036091; SpCas9
gccgccctgagaaggagcggggt

SEQ ID NO: 50160 - DNA, 22 bp, Artificial Sequence
  Synthetic: FXN 5 reverse 9:69036066-69036091; SpCas9
ccgccctgagaaggagcggggt

SEQ ID NO: 50161 - DNA, 21 bp, Artificial Sequence
  Synthetic: FXN 5 reverse 9:69036067-69036091; SpCas9
cgccctgagaaggagcggggt

SEQ ID NO: 50162 - DNA, 20 bp, Artificial Sequence
  Synthetic: FXN 5 reverse 9:69036068-69036091; SpCas9
gccctgagaaggagcggggt

SEQ ID NO: 50163 - DNA, 19 bp, Artificial Sequence
  Synthetic: FXN 5 reverse 9:69036069-69036091; SpCas9
ccctgagaaggagcggggt

SEQ ID NO: 50164 - DNA, 18 bp, Artificial Sequence
  Synthetic: FXN 5 reverse 9:69036070-69036091; SpCas9
cctgagaaggagcggggt

SEQ ID NO: 50165 - DNA, 25 bp, Artificial Sequence
  Synthetic: FXN 5 forward 9:69036065-69036093; SpCas9
caccccgctccttctcagggcggcc

SEQ ID NO: 50166 - DNA, 24 bp, Artificial Sequence
  Synthetic: FXN 5 forward 9:69036066-69036093; SpCas9
accccgctccttctcagggcggcc

SEQ ID NO: 50167 - DNA, 23 bp, Artificial Sequence
  Synthetic: FXN 5 forward 9:69036067-69036093; SpCas9
ccccgctccttctcagggcggcc

SEQ ID NO: 50168 - DNA, 22 bp, Artificial Sequence
  Synthetic: FXN 5 forward 9:69036068-69036093; SpCas9
cccgctccttctcagggcggcc

SEQ ID NO: 50169 - DNA, 21 bp, Artificial Sequence
  Synthetic: FXN 5 forward 9:69036069-69036093; SpCas9
ccgctccttctcagggcggcc

SEQ ID NO: 50170 - DNA, 20 bp, Artificial Sequence
  Synthetic: FXN 5 forward 9:69036070-69036093; SpCas9
cgctccttctcagggcggcc

SEQ ID NO: 50171 - DNA, 19 bp, Artificial Sequence
  Synthetic: FXN 5 forward 9:69036071-69036093; SpCas9
gctccttctcagggcggcc

SEQ ID NO: 50172 - DNA, 18 bp, Artificial Sequence
  Synthetic: FXN 5 forward 9:69036072-69036093; SpCas9
ctccttctcagggcggcc

SEQ ID NO: 50173 - DNA, 25 bp, Artificial Sequence
  Synthetic: FXN 5 reverse 9:69036067-69036095; SpCas9
cgccgggccgccctgagaaggagcg

SEQ ID NO: 50174 - DNA, 24 bp, Artificial Sequence
  Synthetic: FXN 5 reverse 9:69036068-69036095; SpCas9
gccgggccgccctgagaaggagcg

SEQ ID NO: 50175 - DNA, 23 bp, Artificial Sequence
  Synthetic: FXN 5 reverse 9:69036069-69036095; SpCas9
ccgggccgccctgagaaggagcg

SEQ ID NO: 50176 - DNA, 22 bp, Artificial Sequence
  Synthetic: FXN 5 reverse 9:69036070-69036095; SpCas9
cgggccgccctgagaaggagcg

SEQ ID NO: 50177 - DNA, 21 bp, Artificial Sequence
  Synthetic: FXN 5 reverse 9:69036071-69036095; SpCas9
gggccgccctgagaaggagcg

SEQ ID NO: 50178 - DNA, 20 bp, Artificial Sequence
  Synthetic: FXN 5 reverse 9:69036072-69036095; SpCas9
ggccgccctgagaaggagcg

SEQ ID NO: 50179 - DNA, 19 bp, Artificial Sequence
  Synthetic: FXN 5 reverse 9:69036073-69036095; SpCas9
gccgccctgagaaggagcg

SEQ ID NO: 50180 - DNA, 18 bp, Artificial Sequence
  Synthetic: FXN 5 reverse 9:69036074-69036095; SpCas9
ccgccctgagaaggagcg

SEQ ID NO: 50181 - DNA, 25 bp, Artificial Sequence
  Synthetic: FXN 5 forward 9:69036068-69036096; SpCas9
cccgctccttctcagggcggcccgg

SEQ ID NO: 50182 - DNA, 24 bp, Artificial Sequence
  Synthetic: FXN 5 forward 9:69036069-69036096; SpCas9
ccgctccttctcagggcggcccgg

SEQ ID NO: 50183 - DNA, 23 bp, Artificial Sequence
  Synthetic: FXN 5 forward 9:69036070-69036096; SpCas9
cgctccttctcagggcggcccgg

SEQ ID NO: 50184 - DNA, 22 bp, Artificial Sequence
  Synthetic: FXN 5 forward 9:69036071-69036096; SpCas9
gctccttctcagggcggcccgg

SEQ ID NO: 50185 - DNA, 21 bp, Artificial Sequence
  Synthetic: FXN 5 forward 9:69036072-69036096; SpCas9
ctccttctcagggcggcccgg

SEQ ID NO: 50186 - DNA, 20 bp, Artificial Sequence
  Synthetic: FXN 5 forward 9:69036073-69036096; SpCas9
tccttctcagggcggcccgg

SEQ ID NO: 50187 - DNA, 19 bp, Artificial Sequence
  Synthetic: FXN 5 forward 9:69036074-69036096; SpCas9
ccttctcagggcggcccgg

SEQ ID NO: 50188 - DNA, 18 bp, Artificial Sequence
  Synthetic: FXN 5 forward 9:69036075-69036096; SpCas9
cttctcagggcggcccgg

SEQ ID NO: 50189 - DNA, 25 bp, Artificial Sequence
  Synthetic: FXN 5 reverse 9:69036068-69036096; SpCas9
ccgccgggccgccctgagaaggagc

SEQ ID NO: 50190 - DNA, 24 bp, Artificial Sequence
  Synthetic: FXN 5 reverse 9:69036069-69036096; SpCas9
cgccgggccgccctgagaaggagc

SEQ ID NO: 50191 - DNA, 23 bp, Artificial Sequence
  Synthetic: FXN 5 reverse 9:69036070-69036096; SpCas9
gccgggccgccctgagaaggagc

SEQ ID NO: 50192 - DNA, 22 bp, Artificial Sequence
  Synthetic: FXN 5 reverse 9:69036071-69036096; SpCas9
ccgggccgccctgagaaggagc

SEQ ID NO: 50193 - DNA, 21 bp, Artificial Sequence
  Synthetic: FXN 5 reverse 9:69036072-69036096; SpCas9
cgggccgccctgagaaggagc

SEQ ID NO: 50194 - DNA, 20 bp, Artificial Sequence
  Synthetic: FXN 5 reverse 9:69036073-69036096; SpCas9
gggccgccctgagaaggagc

SEQ ID NO: 50195 - DNA, 19 bp, Artificial Sequence
  Synthetic: FXN 5 reverse 9:69036074-69036096; SpCas9
ggccgccctgagaaggagc

SEQ ID NO: 50196 - DNA, 18 bp, Artificial Sequence
  Synthetic: FXN 5 reverse 9:69036075-69036096; SpCas9
gccgccctgagaaggagc

SEQ ID NO: 50197 - DNA, 25 bp, Artificial Sequence
  Synthetic: FXN 5 reverse 9:69036069-69036097; SpCas9
tccgccgggccgccctgagaaggag

SEQ ID NO: 50198 - DNA, 24 bp, Artificial Sequence
  Synthetic: FXN 5 reverse 9:69036070-69036097; SpCas9
ccgccgggccgccctgagaaggag

SEQ ID NO: 50199 - DNA, 23 bp, Artificial Sequence
  Synthetic: FXN 5 reverse 9:69036071-69036097; SpCas9
cgccgggccgccctgagaaggag

SEQ ID NO: 50200 - DNA, 22 bp, Artificial Sequence
  Synthetic: FXN 5 reverse 9:69036072-69036097; SpCas9
gccgggccgccctgagaaggag

SEQ ID NO: 50201 - DNA, 21 bp, Artificial Sequence
  Synthetic: FXN 5 reverse 9:69036073-69036097; SpCas9
ccgggccgccctgagaaggag

SEQ ID NO: 50202 - DNA, 20 bp, Artificial Sequence
  Synthetic: FXN 5 reverse 9:69036074-69036097; SpCas9
cgggccgccctgagaaggag

SEQ ID NO: 50203 - DNA, 19 bp, Artificial Sequence
  Synthetic: FXN 5 reverse 9:69036075-69036097; SpCas9
gggccgccctgagaaggag

SEQ ID NO: 50204 - DNA, 18 bp, Artificial Sequence
  Synthetic: FXN 5 reverse 9:69036076-69036097; SpCas9
ggccgccctgagaaggag

SEQ ID NO: 50205 - DNA, 25 bp, Artificial Sequence
  Synthetic: FXN 5 forward 9:69036071-69036099; SpCas9
gctccttctcagggcggcccggcgg

SEQ ID NO: 50206 - DNA, 24 bp, Artificial Sequence
  Synthetic: FXN 5 forward 9:69036072-69036099; SpCas9
ctccttctcagggcggcccggcgg

SEQ ID NO: 50207 - DNA, 23 bp, Artificial Sequence
  Synthetic: FXN 5 forward 9:69036073-69036099; SpCas9
tccttctcagggcggcccggcgg

SEQ ID NO: 50208 - DNA, 22 bp, Artificial Sequence
  Synthetic: FXN 5 forward 9:69036074-69036099; SpCas9
ccttctcagggcggcccggcgg

SEQ ID NO: 50209 - DNA, 21 bp, Artificial Sequence
  Synthetic: FXN 5 forward 9:69036075-69036099; SpCas9
cttctcagggcggcccggcgg

SEQ ID NO: 50210 - DNA, 20 bp, Artificial Sequence
  Synthetic: FXN 5 forward 9:69036076-69036099; SpCas9
ttctcagggcggcccggcgg

SEQ ID NO: 50211 - DNA, 19 bp, Artificial Sequence
  Synthetic: FXN 5 forward 9:69036077-69036099; SpCas9
tctcagggcggcccggcgg

SEQ ID NO: 50212 - DNA, 18 bp, Artificial Sequence
  Synthetic: FXN 5 forward 9:69036078-69036099; SpCas9
ctcagggcggcccggcgg

SEQ ID NO: 50213 - DNA, 25 bp, Artificial Sequence
  Synthetic: FXN 5 reverse 9:69036072-69036100; SpCas9
gcttccgccgggccgccctgagaag

SEQ ID NO: 50214 - DNA, 24 bp, Artificial Sequence
  Synthetic: FXN 5 reverse 9:69036073-69036100; SpCas9
cttccgccgggccgccctgagaag

SEQ ID NO: 50215 - DNA, 23 bp, Artificial Sequence
  Synthetic: FXN 5 reverse 9:69036074-69036100; SpCas9
ttccgccgggccgccctgagaag

SEQ ID NO: 50216 - DNA, 22 bp, Artificial Sequence
  Synthetic: FXN 5 reverse 9:69036075-69036100; SpCas9
tccgccgggccgccctgagaag

SEQ ID NO: 50217 - DNA, 21 bp, Artificial Sequence
  Synthetic: FXN 5 reverse 9:69036076-69036100; SpCas9
ccgccgggccgccctgagaag

SEQ ID NO: 50218 - DNA, 20 bp, Artificial Sequence
  Synthetic: FXN 5 reverse 9:69036077-69036100; SpCas9
cgccgggccgccctgagaag

SEQ ID NO: 50219 - DNA, 19 bp, Artificial Sequence
  Synthetic: FXN 5 reverse 9:69036078-69036100; SpCas9
gccgggccgccctgagaag

SEQ ID NO: 50220 - DNA, 18 bp, Artificial Sequence
  Synthetic: FXN 5 reverse 9:69036079-69036100; SpCas9
ccgggccgccctgagaag

SEQ ID NO: 50221 - DNA, 25 bp, Artificial Sequence
  Synthetic: FXN 5 forward 9:69036074-69036102; SpCas9
ccttctcagggcggcccggcggaag

SEQ ID NO: 50222 - DNA, 24 bp, Artificial Sequence
  Synthetic: FXN 5 forward 9:69036075-69036102; SpCas9
cttctcagggcggcccggcggaag

SEQ ID NO: 50223 - DNA, 23 bp, Artificial Sequence
  Synthetic: FXN 5 forward 9:69036076-69036102; SpCas9
ttctcagggcggcccggcggaag

SEQ ID NO: 50224 - DNA, 22 bp, Artificial Sequence
  Synthetic: FXN 5 forward 9:69036077-69036102; SpCas9
tctcagggcggcccggcggaag

SEQ ID NO: 50225 - DNA, 21 bp, Artificial Sequence
  Synthetic: FXN 5 forward 9:69036078-69036102; SpCas9
ctcagggcggcccggcggaag

SEQ ID NO: 50226 - DNA, 20 bp, Artificial Sequence
  Synthetic: FXN 5 forward 9:69036079-69036102; SpCas9
tcagggcggcccggcggaag

SEQ ID NO: 50227 - DNA, 19 bp, Artificial Sequence
  Synthetic: FXN 5 forward 9:69036080-69036102; SpCas9
cagggcggcccggcggaag

SEQ ID NO: 50228 - DNA, 18 bp, Artificial Sequence
  Synthetic: FXN 5 forward 9:69036081-69036102; SpCas9
agggcggcccggcggaag

SEQ ID NO: 50229 - DNA, 25 bp, Artificial Sequence
  Synthetic: FXN 5 reverse 9:69036074-69036102; SpCas9
ccgcttccgccgggccgccctgaga

SEQ ID NO: 50230 - DNA, 24 bp, Artificial Sequence
  Synthetic: FXN 5 reverse 9:69036075-69036102; SpCas9
cgcttccgccgggccgccctgaga

SEQ ID NO: 50231 - DNA, 23 bp, Artificial Sequence
  Synthetic: FXN 5 reverse 9:69036076-69036102; SpCas9
gcttccgccgggccgccctgaga

SEQ ID NO: 50232 - DNA, 22 bp, Artificial Sequence
  Synthetic: FXN 5 reverse 9:69036077-69036102; SpCas9
cttccgccgggccgccctgaga

SEQ ID NO: 50233 - DNA, 21 bp, Artificial Sequence
  Synthetic: FXN 5 reverse 9:69036078-69036102; SpCas9
ttccgccgggccgccctgaga

SEQ ID NO: 50234 - DNA, 20 bp, Artificial Sequence
  Synthetic: FXN 5 reverse 9:69036079-69036102; SpCas9
tccgccgggccgccctgaga

SEQ ID NO: 50235 - DNA, 19 bp, Artificial Sequence
  Synthetic: FXN 5 reverse 9:69036080-69036102; SpCas9
ccgccgggccgccctgaga

SEQ ID NO: 50236 - DNA, 18 bp, Artificial Sequence
  Synthetic: FXN 5 reverse 9:69036081-69036102; SpCas9
cgccgggccgccctgaga

SEQ ID NO: 50237 - DNA, 25 bp, Artificial Sequence
  Synthetic: FXN 5 reverse 9:69036075-69036103; SpCas9
gccgcttccgccgggccgccctgag

SEQ ID NO: 50238 - DNA, 24 bp, Artificial Sequence
  Synthetic: FXN 5 reverse 9:69036076-69036103; SpCas9
ccgcttccgccgggccgccctgag

SEQ ID NO: 50239 - DNA, 23 bp, Artificial Sequence
  Synthetic: FXN 5 reverse 9:69036077-69036103; SpCas9
cgcttccgccgggccgccctgag

SEQ ID NO: 50240 - DNA, 22 bp, Artificial Sequence
  Synthetic: FXN 5 reverse 9:69036078-69036103; SpCas9
gcttccgccgggccgccctgag

SEQ ID NO: 50241 - DNA, 21 bp, Artificial Sequence
  Synthetic: FXN 5 reverse 9:69036079-69036103; SpCas9
cttccgccgggccgccctgag

SEQ ID NO: 50242 - DNA, 20 bp, Artificial Sequence
  Synthetic: FXN 5 reverse 9:69036080-69036103; SpCas9
ttccgccgggccgccctgag

SEQ ID NO: 50243 - DNA, 19 bp, Artificial Sequence
  Synthetic: FXN 5 reverse 9:69036081-69036103; SpCas9
tccgccgggccgccctgag

SEQ ID NO: 50244 - DNA, 18 bp, Artificial Sequence
  Synthetic: FXN 5 reverse 9:69036082-69036103; SpCas9
ccgccgggccgccctgag

SEQ ID NO: 50245 - DNA, 25 bp, Artificial Sequence
  Synthetic: FXN 5 reverse 9:69036078-69036106; SpCas9
aaggccgcttccgccgggccgccct

SEQ ID NO: 50246 - DNA, 24 bp, Artificial Sequence
  Synthetic: FXN 5 reverse 9:69036079-69036106; SpCas9
aggccgcttccgccgggccgccct

SEQ ID NO: 50247 - DNA, 23 bp, Artificial Sequence
  Synthetic: FXN 5 reverse 9:69036080-69036106; SpCas9
ggccgcttccgccgggccgccct

SEQ ID NO: 50248 - DNA, 22 bp, Artificial Sequence
  Synthetic: FXN 5 reverse 9:69036081-69036106; SpCas9
gccgcttccgccgggccgccct

SEQ ID NO: 50249 - DNA, 21 bp, Artificial Sequence
  Synthetic: FXN 5 reverse 9:69036082-69036106; SpCas9
ccgcttccgccgggccgccct

SEQ ID NO: 50250 - DNA, 20 bp, Artificial Sequence
  Synthetic: FXN 5 reverse 9:69036083-69036106; SpCas9
cgcttccgccgggccgccct

SEQ ID NO: 50251 - DNA, 19 bp, Artificial Sequence
  Synthetic: FXN 5 reverse 9:69036084-69036106; SpCas9
gcttccgccgggccgccct

SEQ ID NO: 50252 - DNA, 18 bp, Artificial Sequence
  Synthetic: FXN 5 reverse 9:69036085-69036106; SpCas9
cttccgccgggccgccct

SEQ ID NO: 50253 - DNA, 25 bp, Artificial Sequence
  Synthetic: FXN 5 reverse 9:69036088-69036116; SpCas9
agggagttgcaaggccgcttccgcc

SEQ ID NO: 50254 - DNA, 24 bp, Artificial Sequence
  Synthetic: FXN 5 reverse 9:69036089-69036116; SpCas9
gggagttgcaaggccgcttccgcc

SEQ ID NO: 50255 - DNA, 23 bp, Artificial Sequence
  Synthetic: FXN 5 reverse 9:69036090-69036116; SpCas9
ggagttgcaaggccgcttccgcc

SEQ ID NO: 50256 - DNA, 22 bp, Artificial Sequence
  Synthetic: FXN 5 reverse 9:69036091-69036116; SpCas9
gagttgcaaggccgcttccgcc

SEQ ID NO: 50257 - DNA, 21 bp, Artificial Sequence
  Synthetic: FXN 5 reverse 9:69036092-69036116; SpCas9
agttgcaaggccgcttccgcc

SEQ ID NO: 50258 - DNA, 20 bp, Artificial Sequence
  Synthetic: FXN 5 reverse 9:69036093-69036116; SpCas9
gttgcaaggccgcttccgcc

SEQ ID NO: 50259 - DNA, 19 bp, Artificial Sequence
  Synthetic: FXN 5 reverse 9:69036094-69036116; SpCas9
ttgcaaggccgcttccgcc

SEQ ID NO: 50260 - DNA, 18 bp, Artificial Sequence
  Synthetic: FXN 5 reverse 9:69036095-69036116; SpCas9
tgcaaggccgcttccgcc

SEQ ID NO: 50261 - DNA, 25 bp, Artificial Sequence
  Synthetic: FXN 5 reverse 9:69036089-69036117; SpCas9
aagggagttgcaaggccgcttccgc

SEQ ID NO: 50262 - DNA, 24 bp, Artificial Sequence
  Synthetic: FXN 5 reverse 9:69036090-69036117; SpCas9
agggagttgcaaggccgcttccgc

SEQ ID NO: 50263 - DNA, 23 bp, Artificial Sequence
  Synthetic: FXN 5 reverse 9:69036091-69036117; SpCas9
gggagttgcaaggccgcttccgc

SEQ ID NO: 50264 - DNA, 22 bp, Artificial Sequence
  Synthetic: FXN 5 reverse 9:69036092-69036117; SpCas9
ggagttgcaaggccgcttccgc

SEQ ID NO: 50265 - DNA, 21 bp, Artificial Sequence
  Synthetic: FXN 5 reverse 9:69036093-69036117; SpCas9
gagttgcaaggccgcttccgc

SEQ ID NO: 50266 - DNA, 20 bp, Artificial Sequence
  Synthetic: FXN 5 reverse 9:69036094-69036117; SpCas9
agttgcaaggccgcttccgc

SEQ ID NO: 50267 - DNA, 19 bp, Artificial Sequence
  Synthetic: FXN 5 reverse 9:69036095-69036117; SpCas9
gttgcaaggccgcttccgc

SEQ ID NO: 50268 - DNA, 18 bp, Artificial Sequence
  Synthetic: FXN 5 reverse 9:69036096-69036117; SpCas9
ttgcaaggccgcttccgc

SEQ ID NO: 50269 - DNA, 25 bp, Artificial Sequence
  Synthetic: FXN 5 forward 9:69036095-69036123; SpCas9
gaagcggccttgcaactcccttctc

SEQ ID NO: 50270 - DNA, 24 bp, Artificial Sequence
  Synthetic: FXN 5 forward 9:69036096-69036123; SpCas9
aagcggccttgcaactcccttctc

SEQ ID NO: 50271 - DNA, 23 bp, Artificial Sequence
  Synthetic: FXN 5 forward 9:69036097-69036123; SpCas9
agcggccttgcaactcccttctc

SEQ ID NO: 50272 - DNA, 22 bp, Artificial Sequence
  Synthetic: FXN 5 forward 9:69036098-69036123; SpCas9
gcggccttgcaactcccttctc

SEQ ID NO: 50273 - DNA, 21 bp, Artificial Sequence
  Synthetic: FXN 5 forward 9:69036099-69036123; SpCas9
cggccttgcaactcccttctc

SEQ ID NO: 50274 - DNA, 20 bp, Artificial Sequence
  Synthetic: FXN 5 forward 9:69036100-69036123; SpCas9
ggccttgcaactcccttctc

SEQ ID NO: 50275 - DNA, 19 bp, Artificial Sequence
  Synthetic: FXN 5 forward 9:69036101-69036123; SpCas9
gccttgcaactcccttctc

SEQ ID NO: 50276 - DNA, 18 bp, Artificial Sequence
  Synthetic: FXN 5 forward 9:69036102-69036123; SpCas9
ccttgcaactcccttctc

SEQ ID NO: 50277 - DNA, 25 bp, Artificial Sequence
  Synthetic: FXN 5 reverse 9:69036102-69036130; SpCas9
gggagaaccagagaagggagttgca

SEQ ID NO: 50278 - DNA, 24 bp, Artificial Sequence
  Synthetic: FXN 5 reverse 9:69036103-69036130; SpCas9
ggagaaccagagaagggagttgca

SEQ ID NO: 50279 - DNA, 23 bp, Artificial Sequence
  Synthetic: FXN 5 reverse 9:69036104-69036130; SpCas9
gagaaccagagaagggagttgca

SEQ ID NO: 50280 - DNA, 22 bp, Artificial Sequence
  Synthetic: FXN 5 reverse 9:69036105-69036130; SpCas9
agaaccagagaagggagttgca

SEQ ID NO: 50281 - DNA, 21 bp, Artificial Sequence
  Synthetic: FXN 5 reverse 9:69036106-69036130; SpCas9
gaaccagagaagggagttgca

SEQ ID NO: 50282 - DNA, 20 bp, Artificial Sequence
  Synthetic: FXN 5 reverse 9:69036107-69036130; SpCas9
aaccagagaagggagttgca

SEQ ID NO: 50283 - DNA, 19 bp, Artificial Sequence
  Synthetic: FXN 5 reverse 9:69036108-69036130; SpCas9
accagagaagggagttgca

SEQ ID NO: 50284 - DNA, 18 bp, Artificial Sequence
  Synthetic: FXN 5 reverse 9:69036109-69036130; SpCas9
ccagagaagggagttgca

SEQ ID NO: 50285 - DNA, 25 bp, Artificial Sequence
  Synthetic: FXN 5 reverse 9:69036103-69036131; SpCas9
cgggagaaccagagaagggagttgc

SEQ ID NO: 50286 - DNA, 24 bp, Artificial Sequence
  Synthetic: FXN 5 reverse 9:69036104-69036131; SpCas9
gggagaaccagagaagggagttgc

SEQ ID NO: 50287 - DNA, 23 bp, Artificial Sequence
  Synthetic: FXN 5 reverse 9:69036105-69036131; SpCas9
ggagaaccagagaagggagttgc

SEQ ID NO: 50288 - DNA, 22 bp, Artificial Sequence
  Synthetic: FXN 5 reverse 9:69036106-69036131; SpCas9
gagaaccagagaagggagttgc

SEQ ID NO: 50289 - DNA, 21 bp, Artificial Sequence
  Synthetic: FXN 5 reverse 9:69036107-69036131; SpCas9
agaaccagagaagggagttgc

SEQ ID NO: 50290 - DNA, 20 bp, Artificial Sequence
  Synthetic: FXN 5 reverse 9:69036108-69036131; SpCas9
gaaccagagaagggagttgc

SEQ ID NO: 50291 - DNA, 19 bp, Artificial Sequence
  Synthetic: FXN 5 reverse 9:69036109-69036131; SpCas9
aaccagagaagggagttgc

SEQ ID NO: 50292 - DNA, 18 bp, Artificial Sequence
  Synthetic: FXN 5 reverse 9:69036110-69036131; SpCas9
accagagaagggagttgc

SEQ ID NO: 50293 - DNA, 25 bp, Artificial Sequence
  Synthetic: FXN 5 forward 9:69036104-69036132; SpCas9
ttgcaactcccttctctggttctcc

SEQ ID NO: 50294 - DNA, 24 bp, Artificial Sequence
  Synthetic: FXN 5 forward 9:69036105-69036132; SpCas9
tgcaactcccttctctggttctcc

SEQ ID NO: 50295 - DNA, 23 bp, Artificial Sequence
  Synthetic: FXN 5 forward 9:69036106-69036132; SpCas9
gcaactcccttctctggttctcc

SEQ ID NO: 50296 - DNA, 22 bp, Artificial Sequence
  Synthetic: FXN 5 forward 9:69036107-69036132; SpCas9
caactcccttctctggttctcc

SEQ ID NO: 50297 - DNA, 21 bp, Artificial Sequence
  Synthetic: FXN 5 forward 9:69036108-69036132; SpCas9
aactcccttctctggttctcc

SEQ ID NO: 50298 - DNA, 20 bp, Artificial Sequence
  Synthetic: FXN 5 forward 9:69036109-69036132; SpCas9
actcccttctctggttctcc

SEQ ID NO: 50299 - DNA, 19 bp, Artificial Sequence
  Synthetic: FXN 5 forward 9:69036110-69036132; SpCas9
ctcccttctctggttctcc

SEQ ID NO: 50300 - DNA, 18 bp, Artificial Sequence
  Synthetic: FXN 5 forward 9:69036111-69036132; SpCas9
tcccttctctggttctcc

SEQ ID NO: 50301 - DNA, 25 bp, Artificial Sequence
  Synthetic: FXN 5 reverse 9:69036110-69036138; SpCas9
atgcaaccgggagaaccagagaagg

SEQ ID NO: 50302 - DNA, 24 bp, Artificial Sequence
  Synthetic: FXN 5 reverse 9:69036111-69036138; SpCas9
tgcaaccgggagaaccagagaagg

SEQ ID NO: 50303 - DNA, 23 bp, Artificial Sequence
  Synthetic: FXN 5 reverse 9:69036112-69036138; SpCas9
gcaaccgggagaaccagagaagg

SEQ ID NO: 50304 - DNA, 22 bp, Artificial Sequence
  Synthetic: FXN 5 reverse 9:69036113-69036138; SpCas9
caaccgggagaaccagagaagg

SEQ ID NO: 50305 - DNA, 21 bp, Artificial Sequence
  Synthetic: FXN 5 reverse 9:69036114-69036138; SpCas9
aaccgggagaaccagagaagg

SEQ ID NO: 50306 - DNA, 20 bp, Artificial Sequence
  Synthetic: FXN 5 reverse 9:69036115-69036138; SpCas9
accgggagaaccagagaagg

SEQ ID NO: 50307 - DNA, 19 bp, Artificial Sequence
  Synthetic: FXN 5 reverse 9:69036116-69036138; SpCas9
ccgggagaaccagagaagg

SEQ ID NO: 50308 - DNA, 18 bp, Artificial Sequence
  Synthetic: FXN 5 reverse 9:69036117-69036138; SpCas9
cgggagaaccagagaagg

SEQ ID NO: 50309 - DNA, 25 bp, Artificial Sequence
  Synthetic: FXN 5 reverse 9:69036112-69036140; SpCas9
aaatgcaaccgggagaaccagagaa

SEQ ID NO: 50310 - DNA, 24 bp, Artificial Sequence
  Synthetic: FXN 5 reverse 9:69036113-69036140; SpCas9
aatgcaaccgggagaaccagagaa

SEQ ID NO: 50311 - DNA, 23 bp, Artificial Sequence
  Synthetic: FXN 5 reverse 9:69036114-69036140; SpCas9
atgcaaccgggagaaccagagaa

SEQ ID NO: 50312 - DNA, 22 bp, Artificial Sequence
  Synthetic: FXN 5 reverse 9:69036115-69036140; SpCas9
tgcaaccgggagaaccagagaa

SEQ ID NO: 50313 - DNA, 21 bp, Artificial Sequence
  Synthetic: FXN 5 reverse 9:69036116-69036140; SpCas9
gcaaccgggagaaccagagaa

SEQ ID NO: 50314 - DNA, 20 bp, Artificial Sequence
  Synthetic: FXN 5 reverse 9:69036117-69036140; SpCas9
caaccgggagaaccagagaa

SEQ ID NO: 50315 - DNA, 19 bp, Artificial Sequence
  Synthetic: FXN 5 reverse 9:69036118-69036140; SpCas9
aaccgggagaaccagagaa

SEQ ID NO: 50316 - DNA, 18 bp, Artificial Sequence
  Synthetic: FXN 5 reverse 9:69036119-69036140; SpCas9
accgggagaaccagagaa

SEQ ID NO: 50317 - DNA, 25 bp, Artificial Sequence
  Synthetic: FXN 5 reverse 9:69036113-69036141; SpCas9
taaatgcaaccgggagaaccagaga

SEQ ID NO: 50318 - DNA, 24 bp, Artificial Sequence
  Synthetic: FXN 5 reverse 9:69036114-69036141; SpCas9
aaatgcaaccgggagaaccagaga

SEQ ID NO: 50319 - DNA, 23 bp, Artificial Sequence
  Synthetic: FXN 5 reverse 9:69036115-69036141; SpCas9
aatgcaaccgggagaaccagaga

SEQ ID NO: 50320 - DNA, 22 bp, Artificial Sequence
  Synthetic: FXN 5 reverse 9:69036116-69036141; SpCas9
atgcaaccgggagaaccagaga

SEQ ID NO: 50321 - DNA, 21 bp, Artificial Sequence
  Synthetic: FXN 5 reverse 9:69036117-69036141; SpCas9
tgcaaccgggagaaccagaga

SEQ ID NO: 50322 - DNA, 20 bp, Artificial Sequence
  Synthetic: FXN 5 reverse 9:69036118-69036141; SpCas9
gcaaccgggagaaccagaga

SEQ ID NO: 50323 - DNA, 19 bp, Artificial Sequence
  Synthetic: FXN 5 reverse 9:69036119-69036141; SpCas9
caaccgggagaaccagaga

SEQ ID NO: 50324 - DNA, 18 bp, Artificial Sequence
  Synthetic: FXN 5 reverse 9:69036120-69036141; SpCas9
aaccgggagaaccagaga

SEQ ID NO: 50325 - DNA, 25 bp, Artificial Sequence
  Synthetic: FXN 5 reverse 9:69036114-69036142; SpCas9
gtaaatgcaaccgggagaaccagag

SEQ ID NO: 50326 - DNA, 24 bp, Artificial Sequence
  Synthetic: FXN 5 reverse 9:69036115-69036142; SpCas9
taaatgcaaccgggagaaccagag

SEQ ID NO: 50327 - DNA, 23 bp, Artificial Sequence
  Synthetic: FXN 5 reverse 9:69036116-69036142; SpCas9
aaatgcaaccgggagaaccagag

SEQ ID NO: 50328 - DNA, 22 bp, Artificial Sequence
  Synthetic: FXN 5 reverse 9:69036117-69036142; SpCas9
aatgcaaccgggagaaccagag

SEQ ID NO: 50329 - DNA, 21 bp, Artificial Sequence
  Synthetic: FXN 5 reverse 9:69036118-69036142; SpCas9
atgcaaccgggagaaccagag

SEQ ID NO: 50330 - DNA, 20 bp, Artificial Sequence
  Synthetic: FXN 5 reverse 9:69036119-69036142; SpCas9
tgcaaccgggagaaccagag

SEQ ID NO: 50331 - DNA, 19 bp, Artificial Sequence
  Synthetic: FXN 5 reverse 9:69036120-69036142; SpCas9
gcaaccgggagaaccagag

SEQ ID NO: 50332 - DNA, 18 bp, Artificial Sequence
  Synthetic: FXN 5 reverse 9:69036121-69036142; SpCas9
caaccgggagaaccagag

SEQ ID NO: 50333 - DNA, 25 bp, Artificial Sequence
  Synthetic: FXN 5 reverse 9:69036117-69036145; SpCas9
agtgtaaatgcaaccgggagaacca

SEQ ID NO: 50334 - DNA, 24 bp, Artificial Sequence
  Synthetic: FXN 5 reverse 9:69036118-69036145; SpCas9
gtgtaaatgcaaccgggagaacca

SEQ ID NO: 50335 - DNA, 23 bp, Artificial Sequence
  Synthetic: FXN 5 reverse 9:69036119-69036145; SpCas9
tgtaaatgcaaccgggagaacca

SEQ ID NO: 50336 - DNA, 22 bp, Artificial Sequence
  Synthetic: FXN 5 reverse 9:69036120-69036145; SpCas9
gtaaatgcaaccgggagaacca

SEQ ID NO: 50337 - DNA, 21 bp, Artificial Sequence
  Synthetic: FXN 5 reverse 9:69036121-69036145; SpCas9
taaatgcaaccgggagaacca

SEQ ID NO: 50338 - DNA, 20 bp, Artificial Sequence
  Synthetic: FXN 5 reverse 9:69036122-69036145; SpCas9
aaatgcaaccgggagaacca

SEQ ID NO: 50339 - DNA, 19 bp, Artificial Sequence
  Synthetic: FXN 5 reverse 9:69036123-69036145; SpCas9
aatgcaaccgggagaacca

SEQ ID NO: 50340 - DNA, 18 bp, Artificial Sequence
  Synthetic: FXN 5 reverse 9:69036124-69036145; SpCas9
atgcaaccgggagaacca

SEQ ID NO: 50341 - DNA, 25 bp, Artificial Sequence
  Synthetic: FXN 5 forward 9:69036119-69036147; SpCas9
ctggttctcccggttgcatttacac

SEQ ID NO: 50342 - DNA, 24 bp, Artificial Sequence
  Synthetic: FXN 5 forward 9:69036120-69036147; SpCas9
tggttctcccggttgcatttacac

SEQ ID NO: 50343 - DNA, 23 bp, Artificial Sequence
  Synthetic: FXN 5 forward 9:69036121-69036147; SpCas9
ggttctcccggttgcatttacac

SEQ ID NO: 50344 - DNA, 22 bp, Artificial Sequence
  Synthetic: FXN 5 forward 9:69036122-69036147; SpCas9
gttctcccggttgcatttacac

SEQ ID NO: 50345 - DNA, 21 bp, Artificial Sequence
  Synthetic: FXN 5 forward 9:69036123-69036147; SpCas9
ttctcccggttgcatttacac

SEQ ID NO: 50346 - DNA, 20 bp, Artificial Sequence
  Synthetic: FXN 5 forward 9:69036124-69036147; SpCas9
tctcccggttgcatttacac

SEQ ID NO: 50347 - DNA, 19 bp, Artificial Sequence
  Synthetic: FXN 5 forward 9:69036125-69036147; SpCas9
ctcccggttgcatttacac

SEQ ID NO: 50348 - DNA, 18 bp, Artificial Sequence
  Synthetic: FXN 5 forward 9:69036126-69036147; SpCas9
tcccggttgcatttacac

SEQ ID NO: 50349 - DNA, 25 bp, Artificial Sequence
  Synthetic: FXN 5 reverse 9:69036119-69036147; SpCas9
ccagtgtaaatgcaaccgggagaac

SEQ ID NO: 50350 - DNA, 24 bp, Artificial Sequence
  Synthetic: FXN 5 reverse 9:69036120-69036147; SpCas9
cagtgtaaatgcaaccgggagaac

SEQ ID NO: 50351 - DNA, 23 bp, Artificial Sequence
  Synthetic: FXN 5 reverse 9:69036121-69036147; SpCas9
agtgtaaatgcaaccgggagaac

SEQ ID NO: 50352 - DNA, 22 bp, Artificial Sequence
  Synthetic: FXN 5 reverse 9:69036122-69036147; SpCas9
gtgtaaatgcaaccgggagaac

SEQ ID NO: 50353 - DNA, 21 bp, Artificial Sequence
  Synthetic: FXN 5 reverse 9:69036123-69036147; SpCas9
tgtaaatgcaaccgggagaac

SEQ ID NO: 50354 - DNA, 20 bp, Artificial Sequence
  Synthetic: FXN 5 reverse 9:69036124-69036147; SpCas9
gtaaatgcaaccgggagaac

SEQ ID NO: 50355 - DNA, 19 bp, Artificial Sequence
  Synthetic: FXN 5 reverse 9:69036125-69036147; SpCas9
taaatgcaaccgggagaac

SEQ ID NO: 50356 - DNA, 18 bp, Artificial Sequence
  Synthetic: FXN 5 reverse 9:69036126-69036147; SpCas9
aaatgcaaccgggagaac

SEQ ID NO: 50357 - DNA, 25 bp, Artificial Sequence
  Synthetic: FXN 5 reverse 9:69036125-69036153; SpCas9
cagaagccagtgtaaatgcaaccgg

SEQ ID NO: 50358 - DNA, 24 bp, Artificial Sequence
  Synthetic: FXN 5 reverse 9:69036126-69036153; SpCas9
agaagccagtgtaaatgcaaccgg

SEQ ID NO: 50359 - DNA, 23 bp, Artificial Sequence
  Synthetic: FXN 5 reverse 9:69036127-69036153; SpCas9
gaagccagtgtaaatgcaaccgg

SEQ ID NO: 50360 - DNA, 22 bp, Artificial Sequence
  Synthetic: FXN 5 reverse 9:69036128-69036153; SpCas9
aagccagtgtaaatgcaaccgg

SEQ ID NO: 50361 - DNA, 21 bp, Artificial Sequence
  Synthetic: FXN 5 reverse 9:69036129-69036153; SpCas9
agccagtgtaaatgcaaccgg

SEQ ID NO: 50362 - DNA, 20 bp, Artificial Sequence
  Synthetic: FXN 5 reverse 9:69036130-69036153; SpCas9
gccagtgtaaatgcaaccgg

SEQ ID NO: 50363 - DNA, 19 bp, Artificial Sequence
  Synthetic: FXN 5 reverse 9:69036131-69036153; SpCas9
ccagtgtaaatgcaaccgg

SEQ ID NO: 50364 - DNA, 18 bp, Artificial Sequence
  Synthetic: FXN 5 reverse 9:69036132-69036153; SpCas9
cagtgtaaatgcaaccgg

SEQ ID NO: 50365 - DNA, 25 bp, Artificial Sequence
  Synthetic: FXN 5 reverse 9:69036127-69036155; SpCas9
agcagaagccagtgtaaatgcaacc

SEQ ID NO: 50366 - DNA, 24 bp, Artificial Sequence
  Synthetic: FXN 5 reverse 9:69036128-69036155; SpCas9
gcagaagccagtgtaaatgcaacc

SEQ ID NO: 50367 - DNA, 23 bp, Artificial Sequence
  Synthetic: FXN 5 reverse 9:69036129-69036155; SpCas9
cagaagccagtgtaaatgcaacc

SEQ ID NO: 50368 - DNA, 22 bp, Artificial Sequence
  Synthetic: FXN 5 reverse 9:69036130-69036155; SpCas9
agaagccagtgtaaatgcaacc

SEQ ID NO: 50369 - DNA, 21 bp, Artificial Sequence
  Synthetic: FXN 5 reverse 9:69036131-69036155; SpCas9
gaagccagtgtaaatgcaacc

SEQ ID NO: 50370 - DNA, 20 bp, Artificial Sequence
  Synthetic: FXN 5 reverse 9:69036132-69036155; SpCas9
aagccagtgtaaatgcaacc

SEQ ID NO: 50371 - DNA, 19 bp, Artificial Sequence
  Synthetic: FXN 5 reverse 9:69036133-69036155; SpCas9
agccagtgtaaatgcaacc

SEQ ID NO: 50372 - DNA, 18 bp, Artificial Sequence
  Synthetic: FXN 5 reverse 9:69036134-69036155; SpCas9
gccagtgtaaatgcaacc

SEQ ID NO: 50373 - DNA, 25 bp, Artificial Sequence
  Synthetic: FXN 5 reverse 9:69036128-69036156; SpCas9
aagcagaagccagtgtaaatgcaac

SEQ ID NO: 50374 - DNA, 24 bp, Artificial Sequence
  Synthetic: FXN 5 reverse 9:69036129-69036156; SpCas9
agcagaagccagtgtaaatgcaac

SEQ ID NO: 50375 - DNA, 23 bp, Artificial Sequence
  Synthetic: FXN 5 reverse 9:69036130-69036156; SpCas9
gcagaagccagtgtaaatgcaac

SEQ ID NO: 50376 - DNA, 22 bp, Artificial Sequence
  Synthetic: FXN 5 reverse 9:69036131-69036156; SpCas9
cagaagccagtgtaaatgcaac

SEQ ID NO: 50377 - DNA, 21 bp, Artificial Sequence
  Synthetic: FXN 5 reverse 9:69036132-69036156; SpCas9
agaagccagtgtaaatgcaac

SEQ ID NO: 50378 - DNA, 20 bp, Artificial Sequence
  Synthetic: FXN 5 reverse 9:69036133-69036156; SpCas9
gaagccagtgtaaatgcaac

SEQ ID NO: 50379 - DNA, 19 bp, Artificial Sequence
  Synthetic: FXN 5 reverse 9:69036134-69036156; SpCas9
aagccagtgtaaatgcaac

SEQ ID NO: 50380 - DNA, 18 bp, Artificial Sequence
  Synthetic: FXN 5 reverse 9:69036135-69036156; SpCas9
agccagtgtaaatgcaac

SEQ ID NO: 50381 - DNA, 25 bp, Artificial Sequence
  Synthetic: FXN 5 forward 9:69036135-69036163; SpCas9
catttacactggcttctgctttccg

SEQ ID NO: 50382 - DNA, 24 bp, Artificial Sequence
  Synthetic: FXN 5 forward 9:69036136-69036163; SpCas9
atttacactggcttctgctttccg

SEQ ID NO: 50383 - DNA, 23 bp, Artificial Sequence
  Synthetic: FXN 5 forward 9:69036137-69036163; SpCas9
tttacactggcttctgctttccg

SEQ ID NO: 50384 - DNA, 22 bp, Artificial Sequence
  Synthetic: FXN 5 forward 9:69036138-69036163; SpCas9
ttacactggcttctgctttccg

SEQ ID NO: 50385 - DNA, 21 bp, Artificial Sequence
  Synthetic: FXN 5 forward 9:69036139-69036163; SpCas9
tacactggcttctgctttccg

SEQ ID NO: 50386 - DNA, 20 bp, Artificial Sequence
  Synthetic: FXN 5 forward 9:69036140-69036163; SpCas9
acactggcttctgctttccg

SEQ ID NO: 50387 - DNA, 19 bp, Artificial Sequence
  Synthetic: FXN 5 forward 9:69036141-69036163; SpCas9
cactggcttctgctttccg

SEQ ID NO: 50388 - DNA, 18 bp, Artificial Sequence
  Synthetic: FXN 5 forward 9:69036142-69036163; SpCas9
actggcttctgctttccg

SEQ ID NO: 50389 - DNA, 25 bp, Artificial Sequence
  Synthetic: FXN 5 forward 9:69036136-69036164; SpCas9
atttacactggcttctgctttccga

SEQ ID NO: 50390 - DNA, 24 bp, Artificial Sequence
  Synthetic: FXN 5 forward 9:69036137-69036164; SpCas9
tttacactggcttctgctttccga

SEQ ID NO: 50391 - DNA, 23 bp, Artificial Sequence
  Synthetic: FXN 5 forward 9:69036138-69036164; SpCas9
ttacactggcttctgctttccga

SEQ ID NO: 50392 - DNA, 22 bp, Artificial Sequence
  Synthetic: FXN 5 forward 9:69036139-69036164; SpCas9
tacactggcttctgctttccga

SEQ ID NO: 50393 - DNA, 21 bp, Artificial Sequence
  Synthetic: FXN 5 forward 9:69036140-69036164; SpCas9
acactggcttctgctttccga

SEQ ID NO: 50394 - DNA, 20 bp, Artificial Sequence
  Synthetic: FXN 5 forward 9:69036141-69036164; SpCas9
cactggcttctgctttccga

SEQ ID NO: 50395 - DNA, 19 bp, Artificial Sequence
  Synthetic: FXN 5 forward 9:69036142-69036164; SpCas9
actggcttctgctttccga

SEQ ID NO: 50396 - DNA, 18 bp, Artificial Sequence
  Synthetic: FXN 5 forward 9:69036143-69036164; SpCas9
ctggcttctgctttccga

SEQ ID NO: 50397 - DNA, 25 bp, Artificial Sequence
  Synthetic: FXN 5 forward 9:69036141-69036169; SpCas9
cactggcttctgctttccgaaggaa

SEQ ID NO: 50398 - DNA, 24 bp, Artificial Sequence
  Synthetic: FXN 5 forward 9:69036142-69036169; SpCas9
actggcttctgctttccgaaggaa

SEQ ID NO: 50399 - DNA, 23 bp, Artificial Sequence
  Synthetic: FXN 5 forward 9:69036143-69036169; SpCas9
ctggcttctgctttccgaaggaa

SEQ ID NO: 50400 - DNA, 22 bp, Artificial Sequence
  Synthetic: FXN 5 forward 9:69036144-69036169; SpCas9
tggcttctgctttccgaaggaa

SEQ ID NO: 50401 - DNA, 21 bp, Artificial Sequence
  Synthetic: FXN 5 forward 9:69036145-69036169; SpCas9
ggcttctgctttccgaaggaa

SEQ ID NO: 50402 - DNA, 20 bp, Artificial Sequence
  Synthetic: FXN 5 forward 9:69036146-69036169; SpCas9
gcttctgctttccgaaggaa

SEQ ID NO: 50403 - DNA, 19 bp, Artificial Sequence
  Synthetic: FXN 5 forward 9:69036147-69036169; SpCas9
cttctgctttccgaaggaa

SEQ ID NO: 50404 - DNA, 18 bp, Artificial Sequence
  Synthetic: FXN 5 forward 9:69036148-69036169; SpCas9
ttctgctttccgaaggaa

SEQ ID NO: 50405 - DNA, 25 bp, Artificial Sequence
  Synthetic: FXN 5 forward 9:69036142-69036170; SpCas9
actggcttctgctttccgaaggaaa

SEQ ID NO: 50406 - DNA, 24 bp, Artificial Sequence
  Synthetic: FXN 5 forward 9:69036143-69036170; SpCas9
ctggcttctgctttccgaaggaaa

SEQ ID NO: 50407 - DNA, 23 bp, Artificial Sequence
  Synthetic: FXN 5 forward 9:69036144-69036170; SpCas9
tggcttctgctttccgaaggaaa

SEQ ID NO: 50408 - DNA, 22 bp, Artificial Sequence
  Synthetic: FXN 5 forward 9:69036145-69036170; SpCas9
ggcttctgctttccgaaggaaa

SEQ ID NO: 50409 - DNA, 21 bp, Artificial Sequence
  Synthetic: FXN 5 forward 9:69036146-69036170; SpCas9
gcttctgctttccgaaggaaa

SEQ ID NO: 50410 - DNA, 20 bp, Artificial Sequence
  Synthetic: FXN 5 forward 9:69036147-69036170; SpCas9
cttctgctttccgaaggaaa

SEQ ID NO: 50411 - DNA, 19 bp, Artificial Sequence
  Synthetic: FXN 5 forward 9:69036148-69036170; SpCas9
ttctgctttccgaaggaaa

SEQ ID NO: 50412 - DNA, 18 bp, Artificial Sequence
  Synthetic: FXN 5 forward 9:69036149-69036170; SpCas9
tctgctttccgaaggaaa

SEQ ID NO: 50413 - DNA, 25 bp, Artificial Sequence
  Synthetic: FXN 5 forward 9:69036143-69036171; SpCas9
ctggcttctgctttccgaaggaaaa

SEQ ID NO: 50414 - DNA, 24 bp, Artificial Sequence
  Synthetic: FXN 5 forward 9:69036144-69036171; SpCas9
tggcttctgctttccgaaggaaaa

SEQ ID NO: 50415 - DNA, 23 bp, Artificial Sequence
  Synthetic: FXN 5 forward 9:69036145-69036171; SpCas9
ggcttctgctttccgaaggaaaa

SEQ ID NO: 50416 - DNA, 22 bp, Artificial Sequence
  Synthetic: FXN 5 forward 9:69036146-69036171; SpCas9
gcttctgctttccgaaggaaaa

SEQ ID NO: 50417 - DNA, 21 bp, Artificial Sequence
  Synthetic: FXN 5 forward 9:69036147-69036171; SpCas9
cttctgctttccgaaggaaaa

SEQ ID NO: 50418 - DNA, 20 bp, Artificial Sequence
  Synthetic: FXN 5 forward 9:69036148-69036171; SpCas9
ttctgctttccgaaggaaaa

SEQ ID NO: 50419 - DNA, 19 bp, Artificial Sequence
  Synthetic: FXN 5 forward 9:69036149-69036171; SpCas9
tctgctttccgaaggaaaa

SEQ ID NO: 50420 - DNA, 18 bp, Artificial Sequence
  Synthetic: FXN 5 forward 9:69036150-69036171; SpCas9
ctgctttccgaaggaaaa

SEQ ID NO: 50421 - DNA, 25 bp, Artificial Sequence
  Synthetic: FXN 5 reverse 9:69036143-69036171; SpCas9
cccttttccttcggaaagcagaagc

SEQ ID NO: 50422 - DNA, 24 bp, Artificial Sequence
  Synthetic: FXN 5 reverse 9:69036144-69036171; SpCas9
ccttttccttcggaaagcagaagc

SEQ ID NO: 50423 - DNA, 23 bp, Artificial Sequence
  Synthetic: FXN 5 reverse 9:69036145-69036171; SpCas9
cttttccttcggaaagcagaagc

SEQ ID NO: 50424 - DNA, 22 bp, Artificial Sequence
  Synthetic: FXN 5 reverse 9:69036146-69036171; SpCas9
ttttccttcggaaagcagaagc

SEQ ID NO: 50425 - DNA, 21 bp, Artificial Sequence
  Synthetic: FXN 5 reverse 9:69036147-69036171; SpCas9
tttccttcggaaagcagaagc

SEQ ID NO: 50426 - DNA, 20 bp, Artificial Sequence
  Synthetic: FXN 5 reverse 9:69036148-69036171; SpCas9
ttccttcggaaagcagaagc

SEQ ID NO: 50427 - DNA, 19 bp, Artificial Sequence
  Synthetic: FXN 5 reverse 9:69036149-69036171; SpCas9
tccttcggaaagcagaagc

SEQ ID NO: 50428 - DNA, 18 bp, Artificial Sequence
  Synthetic: FXN 5 reverse 9:69036150-69036171; SpCas9
ccttcggaaagcagaagc

SEQ ID NO: 50429 - DNA, 25 bp, Artificial Sequence
  Synthetic: FXN 5 forward 9:69036144-69036172; SpCas9
tggcttctgctttccgaaggaaaag

SEQ ID NO: 50430 - DNA, 24 bp, Artificial Sequence
  Synthetic: FXN 5 forward 9:69036145-69036172; SpCas9
ggcttctgctttccgaaggaaaag

SEQ ID NO: 50431 - DNA, 23 bp, Artificial Sequence
  Synthetic: FXN 5 forward 9:69036146-69036172; SpCas9
gcttctgctttccgaaggaaaag

SEQ ID NO: 50432 - DNA, 22 bp, Artificial Sequence
  Synthetic: FXN 5 forward 9:69036147-69036172; SpCas9
cttctgctttccgaaggaaaag

SEQ ID NO: 50433 - DNA, 21 bp, Artificial Sequence
  Synthetic: FXN 5 forward 9:69036148-69036172; SpCas9
ttctgctttccgaaggaaaag

SEQ ID NO: 50434 - DNA, 20 bp, Artificial Sequence
  Synthetic: FXN 5 forward 9:69036149-69036172; SpCas9
tctgctttccgaaggaaaag

SEQ ID NO: 50435 - DNA, 19 bp, Artificial Sequence
  Synthetic: FXN 5 forward 9:69036150-69036172; SpCas9
ctgctttccgaaggaaaag

SEQ ID NO: 50436 - DNA, 18 bp, Artificial Sequence
  Synthetic: FXN 5 forward 9:69036151-69036172; SpCas9
tgctttccgaaggaaaag

SEQ ID NO: 50437 - DNA, 25 bp, Artificial Sequence
  Synthetic: FXN 5 reverse 9:69036147-69036175; SpCas9
tgtccccttttccttcggaaagcag

SEQ ID NO: 50438 - DNA, 24 bp, Artificial Sequence
  Synthetic: FXN 5 reverse 9:69036148-69036175; SpCas9
gtccccttttccttcggaaagcag

SEQ ID NO: 50439 - DNA, 23 bp, Artificial Sequence
  Synthetic: FXN 5 reverse 9:69036149-69036175; SpCas9
tccccttttccttcggaaagcag

SEQ ID NO: 50440 - DNA, 22 bp, Artificial Sequence
  Synthetic: FXN 5 reverse 9:69036150-69036175; SpCas9
ccccttttccttcggaaagcag

SEQ ID NO: 50441 - DNA, 21 bp, Artificial Sequence
  Synthetic: FXN 5 reverse 9:69036151-69036175; SpCas9
cccttttccttcggaaagcag

SEQ ID NO: 50442 - DNA, 20 bp, Artificial Sequence
  Synthetic: FXN 5 reverse 9:69036152-69036175; SpCas9
ccttttccttcggaaagcag

SEQ ID NO: 50443 - DNA, 19 bp, Artificial Sequence
  Synthetic: FXN 5 reverse 9:69036153-69036175; SpCas9
cttttccttcggaaagcag

SEQ ID NO: 50444 - DNA, 18 bp, Artificial Sequence
  Synthetic: FXN 5 reverse 9:69036154-69036175; SpCas9
ttttccttcggaaagcag

SEQ ID NO: 50445 - DNA, 25 bp, Artificial Sequence
  Synthetic: FXN 5 reverse 9:69036150-69036178; SpCas9
aaatgtccccttttccttcggaaag

SEQ ID NO: 50446 - DNA, 24 bp, Artificial Sequence
  Synthetic: FXN 5 reverse 9:69036151-69036178; SpCas9
aatgtccccttttccttcggaaag

SEQ ID NO: 50447 - DNA, 23 bp, Artificial Sequence
  Synthetic: FXN 5 reverse 9:69036152-69036178; SpCas9
atgtccccttttccttcggaaag

SEQ ID NO: 50448 - DNA, 22 bp, Artificial Sequence
  Synthetic: FXN 5 reverse 9:69036153-69036178; SpCas9
tgtccccttttccttcggaaag

SEQ ID NO: 50449 - DNA, 21 bp, Artificial Sequence
  Synthetic: FXN 5 reverse 9:69036154-69036178; SpCas9
gtccccttttccttcggaaag

SEQ ID NO: 50450 - DNA, 20 bp, Artificial Sequence
  Synthetic: FXN 5 reverse 9:69036155-69036178; SpCas9
tccccttttccttcggaaag

SEQ ID NO: 50451 - DNA, 19 bp, Artificial Sequence
  Synthetic: FXN 5 reverse 9:69036156-69036178; SpCas9
ccccttttccttcggaaag

SEQ ID NO: 50452 - DNA, 18 bp, Artificial Sequence
  Synthetic: FXN 5 reverse 9:69036157-69036178; SpCas9
cccttttccttcggaaag

SEQ ID NO: 50453 - DNA, 25 bp, Artificial Sequence
  Synthetic: FXN 5 reverse 9:69036153-69036181; SpCas9
acaaaatgtccccttttccttcgga

SEQ ID NO: 50454 - DNA, 24 bp, Artificial Sequence
  Synthetic: FXN 5 reverse 9:69036154-69036181; SpCas9
caaaatgtccccttttccttcgga

SEQ ID NO: 50455 - DNA, 23 bp, Artificial Sequence
  Synthetic: FXN 5 reverse 9:69036155-69036181; SpCas9
aaaatgtccccttttccttcgga

SEQ ID NO: 50456 - DNA, 22 bp, Artificial Sequence
  Synthetic: FXN 5 reverse 9:69036156-69036181; SpCas9
aaatgtccccttttccttcgga

SEQ ID NO: 50457 - DNA, 21 bp, Artificial Sequence
  Synthetic: FXN 5 reverse 9:69036157-69036181; SpCas9
aatgtccccttttccttcgga

SEQ ID NO: 50458 - DNA, 20 bp, Artificial Sequence
  Synthetic: FXN 5 reverse 9:69036158-69036181; SpCas9
atgtccccttttccttcgga

SEQ ID NO: 50459 - DNA, 19 bp, Artificial Sequence
  Synthetic: FXN 5 reverse 9:69036159-69036181; SpCas9
tgtccccttttccttcgga

SEQ ID NO: 50460 - DNA, 18 bp, Artificial Sequence
  Synthetic: FXN 5 reverse 9:69036160-69036181; SpCas9
gtccccttttccttcgga

SEQ ID NO: 50461 - DNA, 25 bp, Artificial Sequence
  Synthetic: FXN 5 reverse 9:69036157-69036185; SpCas9
caggacaaaatgtccccttttcctt

SEQ ID NO: 50462 - DNA, 24 bp, Artificial Sequence
  Synthetic: FXN 5 reverse 9:69036158-69036185; SpCas9
aggacaaaatgtccccttttcctt

SEQ ID NO: 50463 - DNA, 23 bp, Artificial Sequence
  Synthetic: FXN 5 reverse 9:69036159-69036185; SpCas9
ggacaaaatgtccccttttcctt

SEQ ID NO: 50464 - DNA, 22 bp, Artificial Sequence
  Synthetic: FXN 5 reverse 9:69036160-69036185; SpCas9
gacaaaatgtccccttttcctt

SEQ ID NO: 50465 - DNA, 21 bp, Artificial Sequence
  Synthetic: FXN 5 reverse 9:69036161-69036185; SpCas9
acaaaatgtccccttttcctt

SEQ ID NO: 50466 - DNA, 20 bp, Artificial Sequence
  Synthetic: FXN 5 reverse 9:69036162-69036185; SpCas9
caaaatgtccccttttcctt

SEQ ID NO: 50467 - DNA, 19 bp, Artificial Sequence
  Synthetic: FXN 5 reverse 9:69036163-69036185; SpCas9
aaaatgtccccttttcctt

SEQ ID NO: 50468 - DNA, 18 bp, Artificial Sequence
  Synthetic: FXN 5 reverse 9:69036164-69036185; SpCas9
aaatgtccccttttcctt

SEQ ID NO: 50469 - DNA, 25 bp, Artificial Sequence
  Synthetic: FXN 5 forward 9:69036160-69036188; SpCas9
aaggaaaaggggacattttgtcctg

SEQ ID NO: 50470 - DNA, 24 bp, Artificial Sequence
  Synthetic: FXN 5 forward 9:69036161-69036188; SpCas9
aggaaaaggggacattttgtcctg

SEQ ID NO: 50471 - DNA, 23 bp, Artificial Sequence
  Synthetic: FXN 5 forward 9:69036162-69036188; SpCas9
ggaaaaggggacattttgtcctg

SEQ ID NO: 50472 - DNA, 22 bp, Artificial Sequence
  Synthetic: FXN 5 forward 9:69036163-69036188; SpCas9
gaaaaggggacattttgtcctg

SEQ ID NO: 50473 - DNA, 21 bp, Artificial Sequence
  Synthetic: FXN 5 forward 9:69036164-69036188; SpCas9
aaaaggggacattttgtcctg

SEQ ID NO: 50474 - DNA, 20 bp, Artificial Sequence
  Synthetic: FXN 5 forward 9:69036165-69036188; SpCas9
aaaggggacattttgtcctg

SEQ ID NO: 50475 - DNA, 19 bp, Artificial Sequence
  Synthetic: FXN 5 forward 9:69036166-69036188; SpCas9
aaggggacattttgtcctg

SEQ ID NO: 50476 - DNA, 18 bp, Artificial Sequence
  Synthetic: FXN 5 forward 9:69036167-69036188; SpCas9
aggggacattttgtcctg

SEQ ID NO: 50477 - DNA, 25 bp, Artificial Sequence
  Synthetic: FXN 5 forward 9:69036171-69036199; SpCas9
gacattttgtcctgcggtgcgactg

SEQ ID NO: 50478 - DNA, 24 bp, Artificial Sequence
  Synthetic: FXN 5 forward 9:69036172-69036199; SpCas9
acattttgtcctgcggtgcgactg

SEQ ID NO: 50479 - DNA, 23 bp, Artificial Sequence
  Synthetic: FXN 5 forward 9:69036173-69036199; SpCas9
cattttgtcctgcggtgcgactg

SEQ ID NO: 50480 - DNA, 22 bp, Artificial Sequence
  Synthetic: FXN 5 forward 9:69036174-69036199; SpCas9
attttgtcctgcggtgcgactg

SEQ ID NO: 50481 - DNA, 21 bp, Artificial Sequence
  Synthetic: FXN 5 forward 9:69036175-69036199; SpCas9
ttttgtcctgcggtgcgactg

SEQ ID NO: 50482 - DNA, 20 bp, Artificial Sequence
  Synthetic: FXN 5 forward 9:69036176-69036199; SpCas9
tttgtcctgcggtgcgactg

SEQ ID NO: 50483 - DNA, 19 bp, Artificial Sequence
  Synthetic: FXN 5 forward 9:69036177-69036199; SpCas9
ttgtcctgcggtgcgactg

SEQ ID NO: 50484 - DNA, 18 bp, Artificial Sequence
  Synthetic: FXN 5 forward 9:69036178-69036199; SpCas9
tgtcctgcggtgcgactg

SEQ ID NO: 50485 - DNA, 25 bp, Artificial Sequence
  Synthetic: FXN 5 forward 9:69036172-69036200; SpCas9
acattttgtcctgcggtgcgactgc

SEQ ID NO: 50486 - DNA, 24 bp, Artificial Sequence
  Synthetic: FXN 5 forward 9:69036173-69036200; SpCas9
cattttgtcctgcggtgcgactgc

SEQ ID NO: 50487 - DNA, 23 bp, Artificial Sequence
  Synthetic: FXN 5 forward 9:69036174-69036200; SpCas9
attttgtcctgcggtgcgactgc

SEQ ID NO: 50488 - DNA, 22 bp, Artificial Sequence
  Synthetic: FXN 5 forward 9:69036175-69036200; SpCas9
ttttgtcctgcggtgcgactgc

SEQ ID NO: 50489 - DNA, 21 bp, Artificial Sequence
  Synthetic: FXN 5 forward 9:69036176-69036200; SpCas9
tttgtcctgcggtgcgactgc

SEQ ID NO: 50490 - DNA, 20 bp, Artificial Sequence
  Synthetic: FXN 5 forward 9:69036177-69036200; SpCas9
ttgtcctgcggtgcgactgc

SEQ ID NO: 50491 - DNA, 19 bp, Artificial Sequence
  Synthetic: FXN 5 forward 9:69036178-69036200; SpCas9
tgtcctgcggtgcgactgc

SEQ ID NO: 50492 - DNA, 18 bp, Artificial Sequence
  Synthetic: FXN 5 forward 9:69036179-69036200; SpCas9
gtcctgcggtgcgactgc

SEQ ID NO: 50493 - DNA, 25 bp, Artificial Sequence
  Synthetic: FXN 5 forward 9:69036177-69036205; SpCas9
ttgtcctgcggtgcgactgcgggtc

SEQ ID NO: 50494 - DNA, 24 bp, Artificial Sequence
  Synthetic: FXN 5 forward 9:69036178-69036205; SpCas9
tgtcctgcggtgcgactgcgggtc

SEQ ID NO: 50495 - DNA, 23 bp, Artificial Sequence
  Synthetic: FXN 5 forward 9:69036179-69036205; SpCas9
gtcctgcggtgcgactgcgggtc

SEQ ID NO: 50496 - DNA, 22 bp, Artificial Sequence
  Synthetic: FXN 5 forward 9:69036180-69036205; SpCas9
tcctgcggtgcgactgcgggtc

SEQ ID NO: 50497 - DNA, 21 bp, Artificial Sequence
  Synthetic: FXN 5 forward 9:69036181-69036205; SpCas9
cctgcggtgcgactgcgggtc

SEQ ID NO: 50498 - DNA, 20 bp, Artificial Sequence
  Synthetic: FXN 5 forward 9:69036182-69036205; SpCas9
ctgcggtgcgactgcgggtc

SEQ ID NO: 50499 - DNA, 19 bp, Artificial Sequence
  Synthetic: FXN 5 forward 9:69036183-69036205; SpCas9
tgcggtgcgactgcgggtc

SEQ ID NO: 50500 - DNA, 18 bp, Artificial Sequence
  Synthetic: FXN 5 forward 9:69036184-69036205; SpCas9
gcggtgcgactgcgggtc

SEQ ID NO: 50501 - DNA, 25 bp, Artificial Sequence
  Synthetic: FXN 5 forward 9:69036178-69036206; SpCas9
tgtcctgcggtgcgactgcgggtca

SEQ ID NO: 50502 - DNA, 24 bp, Artificial Sequence
  Synthetic: FXN 5 forward 9:69036179-69036206; SpCas9
gtcctgcggtgcgactgcgggtca

SEQ ID NO: 50503 - DNA, 23 bp, Artificial Sequence
  Synthetic: FXN 5 forward 9:69036180-69036206; SpCas9
tcctgcggtgcgactgcgggtca

SEQ ID NO: 50504 - DNA, 22 bp, Artificial Sequence
  Synthetic: FXN 5 forward 9:69036181-69036206; SpCas9
cctgcggtgcgactgcgggtca

SEQ ID NO: 50505 - DNA, 21 bp, Artificial Sequence
  Synthetic: FXN 5 forward 9:69036182-69036206; SpCas9
ctgcggtgcgactgcgggtca

SEQ ID NO: 50506 - DNA, 20 bp, Artificial Sequence
  Synthetic: FXN 5 forward 9:69036183-69036206; SpCas9
tgcggtgcgactgcgggtca

SEQ ID NO: 50507 - DNA, 19 bp, Artificial Sequence
  Synthetic: FXN 5 forward 9:69036184-69036206; SpCas9
gcggtgcgactgcgggtca

SEQ ID NO: 50508 - DNA, 18 bp, Artificial Sequence
  Synthetic: FXN 5 forward 9:69036185-69036206; SpCas9
cggtgcgactgcgggtca

SEQ ID NO: 50509 - DNA, 25 bp, Artificial Sequence
  Synthetic: FXN 5 reverse 9:69036181-69036209; SpCas9
gtgccttgacccgcagtcgcaccgc

SEQ ID NO: 50510 - DNA, 24 bp, Artificial Sequence
  Synthetic: FXN 5 reverse 9:69036182-69036209; SpCas9
tgccttgacccgcagtcgcaccgc

SEQ ID NO: 50511 - DNA, 23 bp, Artificial Sequence
  Synthetic: FXN 5 reverse 9:69036183-69036209; SpCas9
gccttgacccgcagtcgcaccgc

SEQ ID NO: 50512 - DNA, 22 bp, Artificial Sequence
  Synthetic: FXN 5 reverse 9:69036184-69036209; SpCas9
ccttgacccgcagtcgcaccgc

SEQ ID NO: 50513 - DNA, 21 bp, Artificial Sequence
  Synthetic: FXN 5 reverse 9:69036185-69036209; SpCas9
cttgacccgcagtcgcaccgc

SEQ ID NO: 50514 - DNA, 20 bp, Artificial Sequence
  Synthetic: FXN 5 reverse 9:69036186-69036209; SpCas9
ttgacccgcagtcgcaccgc

SEQ ID NO: 50515 - DNA, 19 bp, Artificial Sequence
  Synthetic: FXN 5 reverse 9:69036187-69036209; SpCas9
tgacccgcagtcgcaccgc

SEQ ID NO: 50516 - DNA, 18 bp, Artificial Sequence
  Synthetic: FXN 5 reverse 9:69036188-69036209; SpCas9
gacccgcagtcgcaccgc

SEQ ID NO: 50517 - DNA, 25 bp, Artificial Sequence
  Synthetic: FXN 5 reverse 9:69036182-69036210; SpCas9
cgtgccttgacccgcagtcgcaccg

SEQ ID NO: 50518 - DNA, 24 bp, Artificial Sequence
  Synthetic: FXN 5 reverse 9:69036183-69036210; SpCas9
gtgccttgacccgcagtcgcaccg

SEQ ID NO: 50519 - DNA, 23 bp, Artificial Sequence
  Synthetic: FXN 5 reverse 9:69036184-69036210; SpCas9
tgccttgacccgcagtcgcaccg

SEQ ID NO: 50520 - DNA, 22 bp, Artificial Sequence
  Synthetic: FXN 5 reverse 9:69036185-69036210; SpCas9
gccttgacccgcagtcgcaccg

SEQ ID NO: 50521 - DNA, 21 bp, Artificial Sequence
  Synthetic: FXN 5 reverse 9:69036186-69036210; SpCas9
ccttgacccgcagtcgcaccg

SEQ ID NO: 50522 - DNA, 20 bp, Artificial Sequence
  Synthetic: FXN 5 reverse 9:69036187-69036210; SpCas9
cttgacccgcagtcgcaccg

SEQ ID NO: 50523 - DNA, 19 bp, Artificial Sequence
  Synthetic: FXN 5 reverse 9:69036188-69036210; SpCas9
ttgacccgcagtcgcaccg

SEQ ID NO: 50524 - DNA, 18 bp, Artificial Sequence
  Synthetic: FXN 5 reverse 9:69036189-69036210; SpCas9
tgacccgcagtcgcaccg

SEQ ID NO: 50525 - DNA, 25 bp, Artificial Sequence
  Synthetic: FXN 5 forward 9:69036183-69036211; SpCas9
tgcggtgcgactgcgggtcaaggca

SEQ ID NO: 50526 - DNA, 24 bp, Artificial Sequence
  Synthetic: FXN 5 forward 9:69036184-69036211; SpCas9
gcggtgcgactgcgggtcaaggca

SEQ ID NO: 50527 - DNA, 23 bp, Artificial Sequence
  Synthetic: FXN 5 forward 9:69036185-69036211; SpCas9
cggtgcgactgcgggtcaaggca

SEQ ID NO: 50528 - DNA, 22 bp, Artificial Sequence
  Synthetic: FXN 5 forward 9:69036186-69036211; SpCas9
ggtgcgactgcgggtcaaggca

SEQ ID NO: 50529 - DNA, 21 bp, Artificial Sequence
  Synthetic: FXN 5 forward 9:69036187-69036211; SpCas9
gtgcgactgcgggtcaaggca

SEQ ID NO: 50530 - DNA, 20 bp, Artificial Sequence
  Synthetic: FXN 5 forward 9:69036188-69036211; SpCas9
tgcgactgcgggtcaaggca

SEQ ID NO: 50531 - DNA, 19 bp, Artificial Sequence
  Synthetic: FXN 5 forward 9:69036189-69036211; SpCas9
gcgactgcgggtcaaggca

SEQ ID NO: 50532 - DNA, 18 bp, Artificial Sequence
  Synthetic: FXN 5 forward 9:69036190-69036211; SpCas9
cgactgcgggtcaaggca

SEQ ID NO: 50533 - DNA, 25 bp, Artificial Sequence
  Synthetic: FXN 5 forward 9:69036184-69036212; SpCas9
gcggtgcgactgcgggtcaaggcac

SEQ ID NO: 50534 - DNA, 24 bp, Artificial Sequence
  Synthetic: FXN 5 forward 9:69036185-69036212; SpCas9
cggtgcgactgcgggtcaaggcac

SEQ ID NO: 50535 - DNA, 23 bp, Artificial Sequence
  Synthetic: FXN 5 forward 9:69036186-69036212; SpCas9
ggtgcgactgcgggtcaaggcac

SEQ ID NO: 50536 - DNA, 22 bp, Artificial Sequence
  Synthetic: FXN 5 forward 9:69036187-69036212; SpCas9
gtgcgactgcgggtcaaggcac

SEQ ID NO: 50537 - DNA, 21 bp, Artificial Sequence
  Synthetic: FXN 5 forward 9:69036188-69036212; SpCas9
tgcgactgcgggtcaaggcac

SEQ ID NO: 50538 - DNA, 20 bp, Artificial Sequence
  Synthetic: FXN 5 forward 9:69036189-69036212; SpCas9
gcgactgcgggtcaaggcac

SEQ ID NO: 50539 - DNA, 19 bp, Artificial Sequence
  Synthetic: FXN 5 forward 9:69036190-69036212; SpCas9
cgactgcgggtcaaggcac

SEQ ID NO: 50540 - DNA, 18 bp, Artificial Sequence
  Synthetic: FXN 5 forward 9:69036191-69036212; SpCas9
gactgcgggtcaaggcac

SEQ ID NO: 50541 - DNA, 25 bp, Artificial Sequence
  Synthetic: FXN 5 forward 9:69036189-69036217; SpCas9
gcgactgcgggtcaaggcacgggcg

SEQ ID NO: 50542 - DNA, 24 bp, Artificial Sequence
  Synthetic: FXN 5 forward 9:69036190-69036217; SpCas9
cgactgcgggtcaaggcacgggcg

SEQ ID NO: 50543 - DNA, 23 bp, Artificial Sequence
  Synthetic: FXN 5 forward 9:69036191-69036217; SpCas9
gactgcgggtcaaggcacgggcg

SEQ ID NO: 50544 - DNA, 22 bp, Artificial Sequence
  Synthetic: FXN 5 forward 9:69036192-69036217; SpCas9
actgcgggtcaaggcacgggcg

SEQ ID NO: 50545 - DNA, 21 bp, Artificial Sequence
  Synthetic: FXN 5 forward 9:69036193-69036217; SpCas9
ctgcgggtcaaggcacgggcg

SEQ ID NO: 50546 - DNA, 20 bp, Artificial Sequence
  Synthetic: FXN 5 forward 9:69036194-69036217; SpCas9
tgcgggtcaaggcacgggcg

SEQ ID NO: 50547 - DNA, 19 bp, Artificial Sequence
  Synthetic: FXN 5 forward 9:69036195-69036217; SpCas9
gcgggtcaaggcacgggcg

SEQ ID NO: 50548 - DNA, 18 bp, Artificial Sequence
  Synthetic: FXN 5 forward 9:69036196-69036217; SpCas9
cgggtcaaggcacgggcg

SEQ ID NO: 50549 - DNA, 25 bp, Artificial Sequence
  Synthetic: FXN 5 forward 9:69036190-69036218; SpCas9
cgactgcgggtcaaggcacgggcga

SEQ ID NO: 50550 - DNA, 24 bp, Artificial Sequence
  Synthetic: FXN 5 forward 9:69036191-69036218; SpCas9
gactgcgggtcaaggcacgggcga

SEQ ID NO: 50551 - DNA, 23 bp, Artificial Sequence
  Synthetic: FXN 5 forward 9:69036192-69036218; SpCas9
actgcgggtcaaggcacgggcga

SEQ ID NO: 50552 - DNA, 22 bp, Artificial Sequence
  Synthetic: FXN 5 forward 9:69036193-69036218; SpCas9
ctgcgggtcaaggcacgggcga

SEQ ID NO: 50553 - DNA, 21 bp, Artificial Sequence
  Synthetic: FXN 5 forward 9:69036194-69036218; SpCas9
tgcgggtcaaggcacgggcga

SEQ ID NO: 50554 - DNA, 20 bp, Artificial Sequence
  Synthetic: FXN 5 forward 9:69036195-69036218; SpCas9
gcgggtcaaggcacgggcga

SEQ ID NO: 50555 - DNA, 19 bp, Artificial Sequence
  Synthetic: FXN 5 forward 9:69036196-69036218; SpCas9
cgggtcaaggcacgggcga

SEQ ID NO: 50556 - DNA, 18 bp, Artificial Sequence
  Synthetic: FXN 5 forward 9:69036197-69036218; SpCas9
gggtcaaggcacgggcga

SEQ ID NO: 50557 - DNA, 25 bp, Artificial Sequence
  Synthetic: FXN 5 forward 9:69036193-69036221; SpCas9
ctgcgggtcaaggcacgggcgaagg

SEQ ID NO: 50558 - DNA, 24 bp, Artificial Sequence
  Synthetic: FXN 5 forward 9:69036194-69036221; SpCas9
tgcgggtcaaggcacgggcgaagg

SEQ ID NO: 50559 - DNA, 23 bp, Artificial Sequence
  Synthetic: FXN 5 forward 9:69036195-69036221; SpCas9
gcgggtcaaggcacgggcgaagg

SEQ ID NO: 50560 - DNA, 22 bp, Artificial Sequence
  Synthetic: FXN 5 forward 9:69036196-69036221; SpCas9
cgggtcaaggcacgggcgaagg

SEQ ID NO: 50561 - DNA, 21 bp, Artificial Sequence
  Synthetic: FXN 5 forward 9:69036197-69036221; SpCas9
gggtcaaggcacgggcgaagg

SEQ ID NO: 50562 - DNA, 20 bp, Artificial Sequence
  Synthetic: FXN 5 forward 9:69036198-69036221; SpCas9
ggtcaaggcacgggcgaagg

SEQ ID NO: 50563 - DNA, 19 bp, Artificial Sequence
  Synthetic: FXN 5 forward 9:69036199-69036221; SpCas9
gtcaaggcacgggcgaagg

SEQ ID NO: 50564 - DNA, 18 bp, Artificial Sequence
  Synthetic: FXN 5 forward 9:69036200-69036221; SpCas9
tcaaggcacgggcgaagg

SEQ ID NO: 50565 - DNA, 25 bp, Artificial Sequence
  Synthetic: FXN 5 reverse 9:69036193-69036221; SpCas9
ctgccttcgcccgtgccttgacccg

SEQ ID NO: 50566 - DNA, 24 bp, Artificial Sequence
  Synthetic: FXN 5 reverse 9:69036194-69036221; SpCas9
tgccttcgcccgtgccttgacccg

SEQ ID NO: 50567 - DNA, 23 bp, Artificial Sequence
  Synthetic: FXN 5 reverse 9:69036195-69036221; SpCas9
gccttcgcccgtgccttgacccg

SEQ ID NO: 50568 - DNA, 22 bp, Artificial Sequence
  Synthetic: FXN 5 reverse 9:69036196-69036221; SpCas9
ccttcgcccgtgccttgacccg

SEQ ID NO: 50569 - DNA, 21 bp, Artificial Sequence
  Synthetic: FXN 5 reverse 9:69036197-69036221; SpCas9
cttcgcccgtgccttgacccg

SEQ ID NO: 50570 - DNA, 20 bp, Artificial Sequence
  Synthetic: FXN 5 reverse 9:69036198-69036221; SpCas9
ttcgcccgtgccttgacccg

SEQ ID NO: 50571 - DNA, 19 bp, Artificial Sequence
  Synthetic: FXN 5 reverse 9:69036199-69036221; SpCas9
tcgcccgtgccttgacccg

SEQ ID NO: 50572 - DNA, 18 bp, Artificial Sequence
  Synthetic: FXN 5 reverse 9:69036200-69036221; SpCas9
cgcccgtgccttgacccg

SEQ ID NO: 50573 - DNA, 25 bp, Artificial Sequence
  Synthetic: FXN 5 forward 9:69036194-69036222; SpCas9
tgcgggtcaaggcacgggcgaaggc

SEQ ID NO: 50574 - DNA, 24 bp, Artificial Sequence
  Synthetic: FXN 5 forward 9:69036195-69036222; SpCas9
gcgggtcaaggcacgggcgaaggc

SEQ ID NO: 50575 - DNA, 23 bp, Artificial Sequence
  Synthetic: FXN 5 forward 9:69036196-69036222; SpCas9
cgggtcaaggcacgggcgaaggc

SEQ ID NO: 50576 - DNA, 22 bp, Artificial Sequence
  Synthetic: FXN 5 forward 9:69036197-69036222; SpCas9
gggtcaaggcacgggcgaaggc

SEQ ID NO: 50577 - DNA, 21 bp, Artificial Sequence
  Synthetic: FXN 5 forward 9:69036198-69036222; SpCas9
ggtcaaggcacgggcgaaggc

SEQ ID NO: 50578 - DNA, 20 bp, Artificial Sequence
  Synthetic: FXN 5 forward 9:69036199-69036222; SpCas9
gtcaaggcacgggcgaaggc

SEQ ID NO: 50579 - DNA, 19 bp, Artificial Sequence
  Synthetic: FXN 5 forward 9:69036200-69036222; SpCas9
tcaaggcacgggcgaaggc

SEQ ID NO: 50580 - DNA, 18 bp, Artificial Sequence
  Synthetic: FXN 5 forward 9:69036201-69036222; SpCas9
caaggcacgggcgaaggc

SEQ ID NO: 50581 - DNA, 25 bp, Artificial Sequence
  Synthetic: FXN 5 forward 9:69036195-69036223; SpCas9
gcgggtcaaggcacgggcgaaggca

SEQ ID NO: 50582 - DNA, 24 bp, Artificial Sequence
  Synthetic: FXN 5 forward 9:69036196-69036223; SpCas9
cgggtcaaggcacgggcgaaggca

SEQ ID NO: 50583 - DNA, 23 bp, Artificial Sequence
  Synthetic: FXN 5 forward 9:69036197-69036223; SpCas9
gggtcaaggcacgggcgaaggca

SEQ ID NO: 50584 - DNA, 22 bp, Artificial Sequence
  Synthetic: FXN 5 forward 9:69036198-69036223; SpCas9
ggtcaaggcacgggcgaaggca

SEQ ID NO: 50585 - DNA, 21 bp, Artificial Sequence
  Synthetic: FXN 5 forward 9:69036199-69036223; SpCas9
gtcaaggcacgggcgaaggca

SEQ ID NO: 50586 - DNA, 20 bp, Artificial Sequence
  Synthetic: FXN 5 forward 9:69036200-69036223; SpCas9
tcaaggcacgggcgaaggca

SEQ ID NO: 50587 - DNA, 19 bp, Artificial Sequence
  Synthetic: FXN 5 forward 9:69036201-69036223; SpCas9
caaggcacgggcgaaggca

SEQ ID NO: 50588 - DNA, 18 bp, Artificial Sequence
  Synthetic: FXN 5 forward 9:69036202-69036223; SpCas9
aaggcacgggcgaaggca

SEQ ID NO: 50589 - DNA, 25 bp, Artificial Sequence
  Synthetic: FXN 5 forward 9:69036198-69036226; SpCas9
ggtcaaggcacgggcgaaggcaggg

SEQ ID NO: 50590 - DNA, 24 bp, Artificial Sequence
  Synthetic: FXN 5 forward 9:69036199-69036226; SpCas9
gtcaaggcacgggcgaaggcaggg

SEQ ID NO: 50591 - DNA, 23 bp, Artificial Sequence
  Synthetic: FXN 5 forward 9:69036200-69036226; SpCas9
tcaaggcacgggcgaaggcaggg

SEQ ID NO: 50592 - DNA, 22 bp, Artificial Sequence
  Synthetic: FXN 5 forward 9:69036201-69036226; SpCas9
caaggcacgggcgaaggcaggg

SEQ ID NO: 50593 - DNA, 21 bp, Artificial Sequence
  Synthetic: FXN 5 forward 9:69036202-69036226; SpCas9
aaggcacgggcgaaggcaggg

SEQ ID NO: 50594 - DNA, 20 bp, Artificial Sequence
  Synthetic: FXN 5 forward 9:69036203-69036226; SpCas9
aggcacgggcgaaggcaggg

SEQ ID NO: 50595 - DNA, 19 bp, Artificial Sequence
  Synthetic: FXN 5 forward 9:69036204-69036226; SpCas9
ggcacgggcgaaggcaggg

SEQ ID NO: 50596 - DNA, 18 bp, Artificial Sequence
  Synthetic: FXN 5 forward 9:69036205-69036226; SpCas9
gcacgggcgaaggcaggg

SEQ ID NO: 50597 - DNA, 25 bp, Artificial Sequence
  Synthetic: FXN 5 forward 9:69036199-69036227; SpCas9
gtcaaggcacgggcgaaggcagggc

SEQ ID NO: 50598 - DNA, 24 bp, Artificial Sequence
  Synthetic: FXN 5 forward 9:69036200-69036227; SpCas9
tcaaggcacgggcgaaggcagggc

SEQ ID NO: 50599 - DNA, 23 bp, Artificial Sequence
  Synthetic: FXN 5 forward 9:69036201-69036227; SpCas9
caaggcacgggcgaaggcagggc

SEQ ID NO: 50600 - DNA, 22 bp, Artificial Sequence
  Synthetic: FXN 5 forward 9:69036202-69036227; SpCas9
aaggcacgggcgaaggcagggc

SEQ ID NO: 50601 - DNA, 21 bp, Artificial Sequence
  Synthetic: FXN 5 forward 9:69036203-69036227; SpCas9
aggcacgggcgaaggcagggc

SEQ ID NO: 50602 - DNA, 20 bp, Artificial Sequence
  Synthetic: FXN 5 forward 9:69036204-69036227; SpCas9
ggcacgggcgaaggcagggc

SEQ ID NO: 50603 - DNA, 19 bp, Artificial Sequence
  Synthetic: FXN 5 forward 9:69036205-69036227; SpCas9
gcacgggcgaaggcagggc

SEQ ID NO: 50604 - DNA, 18 bp, Artificial Sequence
  Synthetic: FXN 5 forward 9:69036206-69036227; SpCas9
cacgggcgaaggcagggc

SEQ ID NO: 50605 - DNA, 25 bp, Artificial Sequence
  Synthetic: FXN 5 forward 9:69036203-69036231; SpCas9
aggcacgggcgaaggcagggcaggc

SEQ ID NO: 50606 - DNA, 24 bp, Artificial Sequence
  Synthetic: FXN 5 forward 9:69036204-69036231; SpCas9
ggcacgggcgaaggcagggcaggc

SEQ ID NO: 50607 - DNA, 23 bp, Artificial Sequence
  Synthetic: FXN 5 forward 9:69036205-69036231; SpCas9
gcacgggcgaaggcagggcaggc

SEQ ID NO: 50608 - DNA, 22 bp, Artificial Sequence
  Synthetic: FXN 5 forward 9:69036206-69036231; SpCas9
cacgggcgaaggcagggcaggc

SEQ ID NO: 50609 - DNA, 21 bp, Artificial Sequence
  Synthetic: FXN 5 forward 9:69036207-69036231; SpCas9
acgggcgaaggcagggcaggc

SEQ ID NO: 50610 - DNA, 20 bp, Artificial Sequence
  Synthetic: FXN 5 forward 9:69036208-69036231; SpCas9
cgggcgaaggcagggcaggc

SEQ ID NO: 50611 - DNA, 19 bp, Artificial Sequence
  Synthetic: FXN 5 forward 9:69036209-69036231; SpCas9
gggcgaaggcagggcaggc

SEQ ID NO: 50612 - DNA, 18 bp, Artificial Sequence
  Synthetic: FXN 5 forward 9:69036210-69036231; SpCas9
ggcgaaggcagggcaggc

SEQ ID NO: 50613 - DNA, 25 bp, Artificial Sequence
  Synthetic: FXN 5 forward 9:69036206-69036234; SpCas9
cacgggcgaaggcagggcaggctgg

SEQ ID NO: 50614 - DNA, 24 bp, Artificial Sequence
  Synthetic: FXN 5 forward 9:69036207-69036234; SpCas9
acgggcgaaggcagggcaggctgg

SEQ ID NO: 50615 - DNA, 23 bp, Artificial Sequence
  Synthetic: FXN 5 forward 9:69036208-69036234; SpCas9
cgggcgaaggcagggcaggctgg

SEQ ID NO: 50616 - DNA, 22 bp, Artificial Sequence
  Synthetic: FXN 5 forward 9:69036209-69036234; SpCas9
gggcgaaggcagggcaggctgg

SEQ ID NO: 50617 - DNA, 21 bp, Artificial Sequence
  Synthetic: FXN 5 forward 9:69036210-69036234; SpCas9
ggcgaaggcagggcaggctgg

SEQ ID NO: 50618 - DNA, 20 bp, Artificial Sequence
  Synthetic: FXN 5 forward 9:69036211-69036234; SpCas9
gcgaaggcagggcaggctgg

SEQ ID NO: 50619 - DNA, 19 bp, Artificial Sequence
  Synthetic: FXN 5 forward 9:69036212-69036234; SpCas9
cgaaggcagggcaggctgg

SEQ ID NO: 50620 - DNA, 18 bp, Artificial Sequence
  Synthetic: FXN 5 forward 9:69036213-69036234; SpCas9
gaaggcagggcaggctgg

SEQ ID NO: 50621 - DNA, 25 bp, Artificial Sequence
  Synthetic: FXN 5 forward 9:69036208-69036236; SpCas9
cgggcgaaggcagggcaggctggtg

SEQ ID NO: 50622 - DNA, 24 bp, Artificial Sequence
  Synthetic: FXN 5 forward 9:69036209-69036236; SpCas9
gggcgaaggcagggcaggctggtg

SEQ ID NO: 50623 - DNA, 23 bp, Artificial Sequence
  Synthetic: FXN 5 forward 9:69036210-69036236; SpCas9
ggcgaaggcagggcaggctggtg

SEQ ID NO: 50624 - DNA, 22 bp, Artificial Sequence
  Synthetic: FXN 5 forward 9:69036211-69036236; SpCas9
gcgaaggcagggcaggctggtg

SEQ ID NO: 50625 - DNA, 21 bp, Artificial Sequence
  Synthetic: FXN 5 forward 9:69036212-69036236; SpCas9
cgaaggcagggcaggctggtg

SEQ ID NO: 50626 - DNA, 20 bp, Artificial Sequence
  Synthetic: FXN 5 forward 9:69036213-69036236; SpCas9
gaaggcagggcaggctggtg

SEQ ID NO: 50627 - DNA, 19 bp, Artificial Sequence
  Synthetic: FXN 5 forward 9:69036214-69036236; SpCas9
aaggcagggcaggctggtg

SEQ ID NO: 50628 - DNA, 18 bp, Artificial Sequence
  Synthetic: FXN 5 forward 9:69036215-69036236; SpCas9
aggcagggcaggctggtg

SEQ ID NO: 50629 - DNA, 25 bp, Artificial Sequence
  Synthetic: FXN 5 forward 9:69036209-69036237; SpCas9
gggcgaaggcagggcaggctggtgg

SEQ ID NO: 50630 - DNA, 24 bp, Artificial Sequence
  Synthetic: FXN 5 forward 9:69036210-69036237; SpCas9
ggcgaaggcagggcaggctggtgg

SEQ ID NO: 50631 - DNA, 23 bp, Artificial Sequence
  Synthetic: FXN 5 forward 9:69036211-69036237; SpCas9
gcgaaggcagggcaggctggtgg

SEQ ID NO: 50632 - DNA, 22 bp, Artificial Sequence
  Synthetic: FXN 5 forward 9:69036212-69036237; SpCas9
cgaaggcagggcaggctggtgg

SEQ ID NO: 50633 - DNA, 21 bp, Artificial Sequence
  Synthetic: FXN 5 forward 9:69036213-69036237; SpCas9
gaaggcagggcaggctggtgg

SEQ ID NO: 50634 - DNA, 20 bp, Artificial Sequence
  Synthetic: FXN 5 forward 9:69036214-69036237; SpCas9
aaggcagggcaggctggtgg

SEQ ID NO: 50635 - DNA, 19 bp, Artificial Sequence
  Synthetic: FXN 5 forward 9:69036215-69036237; SpCas9
aggcagggcaggctggtgg

SEQ ID NO: 50636 - DNA, 18 bp, Artificial Sequence
  Synthetic: FXN 5 forward 9:69036216-69036237; SpCas9
ggcagggcaggctggtgg

SEQ ID NO: 50637 - DNA, 25 bp, Artificial Sequence
  Synthetic: FXN 5 forward 9:69036210-69036238; SpCas9
ggcgaaggcagggcaggctggtgga

SEQ ID NO: 50638 - DNA, 24 bp, Artificial Sequence
  Synthetic: FXN 5 forward 9:69036211-69036238; SpCas9
gcgaaggcagggcaggctggtgga

SEQ ID NO: 50639 - DNA, 23 bp, Artificial Sequence
  Synthetic: FXN 5 forward 9:69036212-69036238; SpCas9
cgaaggcagggcaggctggtgga

SEQ ID NO: 50640 - DNA, 22 bp, Artificial Sequence
  Synthetic: FXN 5 forward 9:69036213-69036238; SpCas9
gaaggcagggcaggctggtgga

SEQ ID NO: 50641 - DNA, 21 bp, Artificial Sequence
  Synthetic: FXN 5 forward 9:69036214-69036238; SpCas9
aaggcagggcaggctggtgga

SEQ ID NO: 50642 - DNA, 20 bp, Artificial Sequence
  Synthetic: FXN 5 forward 9:69036215-69036238; SpCas9
aggcagggcaggctggtgga

SEQ ID NO: 50643 - DNA, 19 bp, Artificial Sequence
  Synthetic: FXN 5 forward 9:69036216-69036238; SpCas9
ggcagggcaggctggtgga

SEQ ID NO: 50644 - DNA, 18 bp, Artificial Sequence
  Synthetic: FXN 5 forward 9:69036217-69036238; SpCas9
gcagggcaggctggtgga

SEQ ID NO: 50645 - DNA, 25 bp, Artificial Sequence
  Synthetic: FXN 5 forward 9:69036211-69036239; SpCas9
gcgaaggcagggcaggctggtggag

SEQ ID NO: 50646 - DNA, 24 bp, Artificial Sequence
  Synthetic: FXN 5 forward 9:69036212-69036239; SpCas9
cgaaggcagggcaggctggtggag

SEQ ID NO: 50647 - DNA, 23 bp, Artificial Sequence
  Synthetic: FXN 5 forward 9:69036213-69036239; SpCas9
gaaggcagggcaggctggtggag

SEQ ID NO: 50648 - DNA, 22 bp, Artificial Sequence
  Synthetic: FXN 5 forward 9:69036214-69036239; SpCas9
aaggcagggcaggctggtggag

SEQ ID NO: 50649 - DNA, 21 bp, Artificial Sequence
  Synthetic: FXN 5 forward 9:69036215-69036239; SpCas9
aggcagggcaggctggtggag

SEQ ID NO: 50650 - DNA, 20 bp, Artificial Sequence
  Synthetic: FXN 5 forward 9:69036216-69036239; SpCas9
ggcagggcaggctggtggag

SEQ ID NO: 50651 - DNA, 19 bp, Artificial Sequence
  Synthetic: FXN 5 forward 9:69036217-69036239; SpCas9
gcagggcaggctggtggag

SEQ ID NO: 50652 - DNA, 18 bp, Artificial Sequence
  Synthetic: FXN 5 forward 9:69036218-69036239; SpCas9
cagggcaggctggtggag

SEQ ID NO: 50653 - DNA, 25 bp, Artificial Sequence
  Synthetic: FXN 5 forward 9:69036216-69036244; SpCas9
ggcagggcaggctggtggaggggac

SEQ ID NO: 50654 - DNA, 24 bp, Artificial Sequence
  Synthetic: FXN 5 forward 9:69036217-69036244; SpCas9
gcagggcaggctggtggaggggac

SEQ ID NO: 50655 - DNA, 23 bp, Artificial Sequence
  Synthetic: FXN 5 forward 9:69036218-69036244; SpCas9
cagggcaggctggtggaggggac

SEQ ID NO: 50656 - DNA, 22 bp, Artificial Sequence
  Synthetic: FXN 5 forward 9:69036219-69036244; SpCas9
agggcaggctggtggaggggac

SEQ ID NO: 50657 - DNA, 21 bp, Artificial Sequence
  Synthetic: FXN 5 forward 9:69036220-69036244; SpCas9
gggcaggctggtggaggggac

SEQ ID NO: 50658 - DNA, 20 bp, Artificial Sequence
  Synthetic: FXN 5 forward 9:69036221-69036244; SpCas9
ggcaggctggtggaggggac

SEQ ID NO: 50659 - DNA, 19 bp, Artificial Sequence
  Synthetic: FXN 5 forward 9:69036222-69036244; SpCas9
gcaggctggtggaggggac

SEQ ID NO: 50660 - DNA, 18 bp, Artificial Sequence
  Synthetic: FXN 5 forward 9:69036223-69036244; SpCas9
caggctggtggaggggac

SEQ ID NO: 50661 - DNA, 25 bp, Artificial Sequence
  Synthetic: FXN 5 forward 9:69036223-69036251; SpCas9
caggctggtggaggggaccggttcc

SEQ ID NO: 50662 - DNA, 24 bp, Artificial Sequence
  Synthetic: FXN 5 forward 9:69036224-69036251; SpCas9
aggctggtggaggggaccggttcc

SEQ ID NO: 50663 - DNA, 23 bp, Artificial Sequence
  Synthetic: FXN 5 forward 9:69036225-69036251; SpCas9
ggctggtggaggggaccggttcc

SEQ ID NO: 50664 - DNA, 22 bp, Artificial Sequence
  Synthetic: FXN 5 forward 9:69036226-69036251; SpCas9
gctggtggaggggaccggttcc

SEQ ID NO: 50665 - DNA, 21 bp, Artificial Sequence
  Synthetic: FXN 5 forward 9:69036227-69036251; SpCas9
ctggtggaggggaccggttcc

SEQ ID NO: 50666 - DNA, 20 bp, Artificial Sequence
  Synthetic: FXN 5 forward 9:69036228-69036251; SpCas9
tggtggaggggaccggttcc

SEQ ID NO: 50667 - DNA, 19 bp, Artificial Sequence
  Synthetic: FXN 5 forward 9:69036229-69036251; SpCas9
ggtggaggggaccggttcc

SEQ ID NO: 50668 - DNA, 18 bp, Artificial Sequence
  Synthetic: FXN 5 forward 9:69036230-69036251; SpCas9
gtggaggggaccggttcc

SEQ ID NO: 50669 - DNA, 25 bp, Artificial Sequence
  Synthetic: FXN 5 forward 9:69036224-69036252; SpCas9
aggctggtggaggggaccggttccg

SEQ ID NO: 50670 - DNA, 24 bp, Artificial Sequence
  Synthetic: FXN 5 forward 9:69036225-69036252; SpCas9
ggctggtggaggggaccggttccg

SEQ ID NO: 50671 - DNA, 23 bp, Artificial Sequence
  Synthetic: FXN 5 forward 9:69036226-69036252; SpCas9
gctggtggaggggaccggttccg

SEQ ID NO: 50672 - DNA, 22 bp, Artificial Sequence
  Synthetic: FXN 5 forward 9:69036227-69036252; SpCas9
ctggtggaggggaccggttccg

SEQ ID NO: 50673 - DNA, 21 bp, Artificial Sequence
  Synthetic: FXN 5 forward 9:69036228-69036252; SpCas9
tggtggaggggaccggttccg

SEQ ID NO: 50674 - DNA, 20 bp, Artificial Sequence
  Synthetic: FXN 5 forward 9:69036229-69036252; SpCas9
ggtggaggggaccggttccg

SEQ ID NO: 50675 - DNA, 19 bp, Artificial Sequence
  Synthetic: FXN 5 forward 9:69036230-69036252; SpCas9
gtggaggggaccggttccg

SEQ ID NO: 50676 - DNA, 18 bp, Artificial Sequence
  Synthetic: FXN 5 forward 9:69036231-69036252; SpCas9
tggaggggaccggttccg

SEQ ID NO: 50677 - DNA, 25 bp, Artificial Sequence
  Synthetic: FXN 5 forward 9:69036225-69036253; SpCas9
ggctggtggaggggaccggttccga

SEQ ID NO: 50678 - DNA, 24 bp, Artificial Sequence
  Synthetic: FXN 5 forward 9:69036226-69036253; SpCas9
gctggtggaggggaccggttccga

SEQ ID NO: 50679 - DNA, 23 bp, Artificial Sequence
  Synthetic: FXN 5 forward 9:69036227-69036253; SpCas9
ctggtggaggggaccggttccga

SEQ ID NO: 50680 - DNA, 22 bp, Artificial Sequence
  Synthetic: FXN 5 forward 9:69036228-69036253; SpCas9
tggtggaggggaccggttccga

SEQ ID NO: 50681 - DNA, 21 bp, Artificial Sequence
  Synthetic: FXN 5 forward 9:69036229-69036253; SpCas9
ggtggaggggaccggttccga

SEQ ID NO: 50682 - DNA, 20 bp, Artificial Sequence
  Synthetic: FXN 5 forward 9:69036230-69036253; SpCas9
gtggaggggaccggttccga

SEQ ID NO: 50683 - DNA, 19 bp, Artificial Sequence
  Synthetic: FXN 5 forward 9:69036231-69036253; SpCas9
tggaggggaccggttccga

SEQ ID NO: 50684 - DNA, 18 bp, Artificial Sequence
  Synthetic: FXN 5 forward 9:69036232-69036253; SpCas9
ggaggggaccggttccga

SEQ ID NO: 50685 - DNA, 25 bp, Artificial Sequence
  Synthetic: FXN 5 forward 9:69036226-69036254; SpCas9
gctggtggaggggaccggttccgag

SEQ ID NO: 50686 - DNA, 24 bp, Artificial Sequence
  Synthetic: FXN 5 forward 9:69036227-69036254; SpCas9
ctggtggaggggaccggttccgag

SEQ ID NO: 50687 - DNA, 23 bp, Artificial Sequence
  Synthetic: FXN 5 forward 9:69036228-69036254; SpCas9
tggtggaggggaccggttccgag

SEQ ID NO: 50688 - DNA, 22 bp, Artificial Sequence
  Synthetic: FXN 5 forward 9:69036229-69036254; SpCas9
ggtggaggggaccggttccgag

SEQ ID NO: 50689 - DNA, 21 bp, Artificial Sequence
  Synthetic: FXN 5 forward 9:69036230-69036254; SpCas9
gtggaggggaccggttccgag

SEQ ID NO: 50690 - DNA, 20 bp, Artificial Sequence
  Synthetic: FXN 5 forward 9:69036231-69036254; SpCas9
tggaggggaccggttccgag

SEQ ID NO: 50691 - DNA, 19 bp, Artificial Sequence
  Synthetic: FXN 5 forward 9:69036232-69036254; SpCas9
ggaggggaccggttccgag

SEQ ID NO: 50692 - DNA, 18 bp, Artificial Sequence
  Synthetic: FXN 5 forward 9:69036233-69036254; SpCas9
gaggggaccggttccgag

SEQ ID NO: 50693 - DNA, 25 bp, Artificial Sequence
  Synthetic: FXN 5 reverse 9:69036227-69036255; SpCas9
acccctcggaaccggtcccctccac

SEQ ID NO: 50694 - DNA, 24 bp, Artificial Sequence
  Synthetic: FXN 5 reverse 9:69036228-69036255; SpCas9
cccctcggaaccggtcccctccac

SEQ ID NO: 50695 - DNA, 23 bp, Artificial Sequence
  Synthetic: FXN 5 reverse 9:69036229-69036255; SpCas9
ccctcggaaccggtcccctccac

SEQ ID NO: 50696 - DNA, 22 bp, Artificial Sequence
  Synthetic: FXN 5 reverse 9:69036230-69036255; SpCas9
cctcggaaccggtcccctccac

SEQ ID NO: 50697 - DNA, 21 bp, Artificial Sequence
  Synthetic: FXN 5 reverse 9:69036231-69036255; SpCas9
ctcggaaccggtcccctccac

SEQ ID NO: 50698 - DNA, 20 bp, Artificial Sequence
  Synthetic: FXN 5 reverse 9:69036232-69036255; SpCas9
tcggaaccggtcccctccac

SEQ ID NO: 50699 - DNA, 19 bp, Artificial Sequence
  Synthetic: FXN 5 reverse 9:69036233-69036255; SpCas9
cggaaccggtcccctccac

SEQ ID NO: 50700 - DNA, 18 bp, Artificial Sequence
  Synthetic: FXN 5 reverse 9:69036234-69036255; SpCas9
ggaaccggtcccctccac

SEQ ID NO: 50701 - DNA, 25 bp, Artificial Sequence
  Synthetic: FXN 5 forward 9:69036233-69036261; SpCas9
gaggggaccggttccgaggggtgtg

SEQ ID NO: 50702 - DNA, 24 bp, Artificial Sequence
  Synthetic: FXN 5 forward 9:69036234-69036261; SpCas9
aggggaccggttccgaggggtgtg

SEQ ID NO: 50703 - DNA, 23 bp, Artificial Sequence
  Synthetic: FXN 5 forward 9:69036235-69036261; SpCas9
ggggaccggttccgaggggtgtg

SEQ ID NO: 50704 - DNA, 22 bp, Artificial Sequence
  Synthetic: FXN 5 forward 9:69036236-69036261; SpCas9
gggaccggttccgaggggtgtg

SEQ ID NO: 50705 - DNA, 21 bp, Artificial Sequence
  Synthetic: FXN 5 forward 9:69036237-69036261; SpCas9
ggaccggttccgaggggtgtg

SEQ ID NO: 50706 - DNA, 20 bp, Artificial Sequence
  Synthetic: FXN 5 forward 9:69036238-69036261; SpCas9
gaccggttccgaggggtgtg

SEQ ID NO: 50707 - DNA, 19 bp, Artificial Sequence
  Synthetic: FXN 5 forward 9:69036239-69036261; SpCas9
accggttccgaggggtgtg

SEQ ID NO: 50708 - DNA, 18 bp, Artificial Sequence
  Synthetic: FXN 5 forward 9:69036240-69036261; SpCas9
ccggttccgaggggtgtg

SEQ ID NO: 50709 - DNA, 25 bp, Artificial Sequence
  Synthetic: FXN 5 reverse 9:69036240-69036268; SpCas9
gagacagccgcacacccctcggaac

SEQ ID NO: 50710 - DNA, 24 bp, Artificial Sequence
  Synthetic: FXN 5 reverse 9:69036241-69036268; SpCas9
agacagccgcacacccctcggaac

SEQ ID NO: 50711 - DNA, 23 bp, Artificial Sequence
  Synthetic: FXN 5 reverse 9:69036242-69036268; SpCas9
gacagccgcacacccctcggaac

SEQ ID NO: 50712 - DNA, 22 bp, Artificial Sequence
  Synthetic: FXN 5 reverse 9:69036243-69036268; SpCas9
acagccgcacacccctcggaac

SEQ ID NO: 50713 - DNA, 21 bp, Artificial Sequence
  Synthetic: FXN 5 reverse 9:69036244-69036268; SpCas9
cagccgcacacccctcggaac

SEQ ID NO: 50714 - DNA, 20 bp, Artificial Sequence
  Synthetic: FXN 5 reverse 9:69036245-69036268; SpCas9
agccgcacacccctcggaac

SEQ ID NO: 50715 - DNA, 19 bp, Artificial Sequence
  Synthetic: FXN 5 reverse 9:69036246-69036268; SpCas9
gccgcacacccctcggaac

SEQ ID NO: 50716 - DNA, 18 bp, Artificial Sequence
  Synthetic: FXN 5 reverse 9:69036247-69036268; SpCas9
ccgcacacccctcggaac

SEQ ID NO: 50717 - DNA, 25 bp, Artificial Sequence
  Synthetic: FXN 5 reverse 9:69036246-69036274; SpCas9
agcatggagacagccgcacacccct

SEQ ID NO: 50718 - DNA, 24 bp, Artificial Sequence
  Synthetic: FXN 5 reverse 9:69036247-69036274; SpCas9
gcatggagacagccgcacacccct

SEQ ID NO: 50719 - DNA, 23 bp, Artificial Sequence
  Synthetic: FXN 5 reverse 9:69036248-69036274; SpCas9
catggagacagccgcacacccct

SEQ ID NO: 50720 - DNA, 22 bp, Artificial Sequence
  Synthetic: FXN 5 reverse 9:69036249-69036274; SpCas9
atggagacagccgcacacccct

SEQ ID NO: 50721 - DNA, 21 bp, Artificial Sequence
  Synthetic: FXN 5 reverse 9:69036250-69036274; SpCas9
tggagacagccgcacacccct

SEQ ID NO: 50722 - DNA, 20 bp, Artificial Sequence
  Synthetic: FXN 5 reverse 9:69036251-69036274; SpCas9
ggagacagccgcacacccct

SEQ ID NO: 50723 - DNA, 19 bp, Artificial Sequence
  Synthetic: FXN 5 reverse 9:69036252-69036274; SpCas9
gagacagccgcacacccct

SEQ ID NO: 50724 - DNA, 18 bp, Artificial Sequence
  Synthetic: FXN 5 reverse 9:69036253-69036274; SpCas9
agacagccgcacacccct

SEQ ID NO: 50725 - DNA, 25 bp, Artificial Sequence
  Synthetic: FXN 5 reverse 9:69036261-69036289; SpCas9
cgcagagaagtgacaagcatggaga

SEQ ID NO: 50726 - DNA, 24 bp, Artificial Sequence
  Synthetic: FXN 5 reverse 9:69036262-69036289; SpCas9
gcagagaagtgacaagcatggaga

SEQ ID NO: 50727 - DNA, 23 bp, Artificial Sequence
  Synthetic: FXN 5 reverse 9:69036263-69036289; SpCas9
cagagaagtgacaagcatggaga

SEQ ID NO: 50728 - DNA, 22 bp, Artificial Sequence
  Synthetic: FXN 5 reverse 9:69036264-69036289; SpCas9
agagaagtgacaagcatggaga

SEQ ID NO: 50729 - DNA, 21 bp, Artificial Sequence
  Synthetic: FXN 5 reverse 9:69036265-69036289; SpCas9
gagaagtgacaagcatggaga

SEQ ID NO: 50730 - DNA, 20 bp, Artificial Sequence
  Synthetic: FXN 5 reverse 9:69036266-69036289; SpCas9
agaagtgacaagcatggaga

SEQ ID NO: 50731 - DNA, 19 bp, Artificial Sequence
  Synthetic: FXN 5 reverse 9:69036267-69036289; SpCas9
gaagtgacaagcatggaga

SEQ ID NO: 50732 - DNA, 18 bp, Artificial Sequence
  Synthetic: FXN 5 reverse 9:69036268-69036289; SpCas9
aagtgacaagcatggaga

SEQ ID NO: 50733 - DNA, 25 bp, Artificial Sequence
  Synthetic: FXN 5 reverse 9:69036265-69036293; SpCas9
ttatcgcagagaagtgacaagcatg

SEQ ID NO: 50734 - DNA, 24 bp, Artificial Sequence
  Synthetic: FXN 5 reverse 9:69036266-69036293; SpCas9
tatcgcagagaagtgacaagcatg

SEQ ID NO: 50735 - DNA, 23 bp, Artificial Sequence
  Synthetic: FXN 5 reverse 9:69036267-69036293; SpCas9
atcgcagagaagtgacaagcatg

SEQ ID NO: 50736 - DNA, 22 bp, Artificial Sequence
  Synthetic: FXN 5 reverse 9:69036268-69036293; SpCas9
tcgcagagaagtgacaagcatg

SEQ ID NO: 50737 - DNA, 21 bp, Artificial Sequence
  Synthetic: FXN 5 reverse 9:69036269-69036293; SpCas9
cgcagagaagtgacaagcatg

SEQ ID NO: 50738 - DNA, 20 bp, Artificial Sequence
  Synthetic: FXN 5 reverse 9:69036270-69036293; SpCas9
gcagagaagtgacaagcatg

SEQ ID NO: 50739 - DNA, 19 bp, Artificial Sequence
  Synthetic: FXN 5 reverse 9:69036271-69036293; SpCas9
cagagaagtgacaagcatg

SEQ ID NO: 50740 - DNA, 18 bp, Artificial Sequence
  Synthetic: FXN 5 reverse 9:69036272-69036293; SpCas9
agagaagtgacaagcatg

SEQ ID NO: 50741 - DNA, 25 bp, Artificial Sequence
  Synthetic: FXN 5 reverse 9:69036267-69036295; SpCas9
agttatcgcagagaagtgacaagca

SEQ ID NO: 50742 - DNA, 24 bp, Artificial Sequence
  Synthetic: FXN 5 reverse 9:69036268-69036295; SpCas9
gttatcgcagagaagtgacaagca

SEQ ID NO: 50743 - DNA, 23 bp, Artificial Sequence
  Synthetic: FXN 5 reverse 9:69036269-69036295; SpCas9
ttatcgcagagaagtgacaagca

SEQ ID NO: 50744 - DNA, 22 bp, Artificial Sequence
  Synthetic: FXN 5 reverse 9:69036270-69036295; SpCas9
tatcgcagagaagtgacaagca

SEQ ID NO: 50745 - DNA, 21 bp, Artificial Sequence
  Synthetic: FXN 5 reverse 9:69036271-69036295; SpCas9
atcgcagagaagtgacaagca

SEQ ID NO: 50746 - DNA, 20 bp, Artificial Sequence
  Synthetic: FXN 5 reverse 9:69036272-69036295; SpCas9
tcgcagagaagtgacaagca

SEQ ID NO: 50747 - DNA, 19 bp, Artificial Sequence
  Synthetic: FXN 5 reverse 9:69036273-69036295; SpCas9
cgcagagaagtgacaagca

SEQ ID NO: 50748 - DNA, 18 bp, Artificial Sequence
  Synthetic: FXN 5 reverse 9:69036274-69036295; SpCas9
gcagagaagtgacaagca

SEQ ID NO: 50749 - DNA, 25 bp, Artificial Sequence
  Synthetic: FXN 5 reverse 9:69036272-69036300; SpCas9
aaacaagttatcgcagagaagtgac

SEQ ID NO: 50750 - DNA, 24 bp, Artificial Sequence
  Synthetic: FXN 5 reverse 9:69036273-69036300; SpCas9
aacaagttatcgcagagaagtgac

SEQ ID NO: 50751 - DNA, 23 bp, Artificial Sequence
  Synthetic: FXN 5 reverse 9:69036274-69036300; SpCas9
acaagttatcgcagagaagtgac

SEQ ID NO: 50752 - DNA, 22 bp, Artificial Sequence
  Synthetic: FXN 5 reverse 9:69036275-69036300; SpCas9
caagttatcgcagagaagtgac

SEQ ID NO: 50753 - DNA, 21 bp, Artificial Sequence
  Synthetic: FXN 5 reverse 9:69036276-69036300; SpCas9
aagttatcgcagagaagtgac

SEQ ID NO: 50754 - DNA, 20 bp, Artificial Sequence
  Synthetic: FXN 5 reverse 9:69036277-69036300; SpCas9
agttatcgcagagaagtgac

SEQ ID NO: 50755 - DNA, 19 bp, Artificial Sequence
  Synthetic: FXN 5 reverse 9:69036278-69036300; SpCas9
gttatcgcagagaagtgac

SEQ ID NO: 50756 - DNA, 18 bp, Artificial Sequence
  Synthetic: FXN 5 reverse 9:69036279-69036300; SpCas9
ttatcgcagagaagtgac

SEQ ID NO: 50757 - DNA, 25 bp, Artificial Sequence
  Synthetic: FXN 5 forward 9:69036275-69036303; SpCas9
gtcacttctctgcgataacttgttt

SEQ ID NO: 50758 - DNA, 24 bp, Artificial Sequence
  Synthetic: FXN 5 forward 9:69036276-69036303; SpCas9
tcacttctctgcgataacttgttt

SEQ ID NO: 50759 - DNA, 23 bp, Artificial Sequence
  Synthetic: FXN 5 forward 9:69036277-69036303; SpCas9
cacttctctgcgataacttgttt

SEQ ID NO: 50760 - DNA, 22 bp, Artificial Sequence
  Synthetic: FXN 5 forward 9:69036278-69036303; SpCas9
acttctctgcgataacttgttt

SEQ ID NO: 50761 - DNA, 21 bp, Artificial Sequence
  Synthetic: FXN 5 forward 9:69036279-69036303; SpCas9
cttctctgcgataacttgttt

SEQ ID NO: 50762 - DNA, 20 bp, Artificial Sequence
  Synthetic: FXN 5 forward 9:69036280-69036303; SpCas9
ttctctgcgataacttgttt

SEQ ID NO: 50763 - DNA, 19 bp, Artificial Sequence
  Synthetic: FXN 5 forward 9:69036281-69036303; SpCas9
tctctgcgataacttgttt

SEQ ID NO: 50764 - DNA, 18 bp, Artificial Sequence
  Synthetic: FXN 5 forward 9:69036282-69036303; SpCas9
ctctgcgataacttgttt

SEQ ID NO: 50765 - DNA, 25 bp, Artificial Sequence
  Synthetic: FXN 5 reverse 9:69036279-69036307; SpCas9
attactgaaacaagttatcgcagag

SEQ ID NO: 50766 - DNA, 24 bp, Artificial Sequence
  Synthetic: FXN 5 reverse 9:69036280-69036307; SpCas9
ttactgaaacaagttatcgcagag

SEQ ID NO: 50767 - DNA, 23 bp, Artificial Sequence
  Synthetic: FXN 5 reverse 9:69036281-69036307; SpCas9
tactgaaacaagttatcgcagag

SEQ ID NO: 50768 - DNA, 22 bp, Artificial Sequence
  Synthetic: FXN 5 reverse 9:69036282-69036307; SpCas9
actgaaacaagttatcgcagag

SEQ ID NO: 50769 - DNA, 21 bp, Artificial Sequence
  Synthetic: FXN 5 reverse 9:69036283-69036307; SpCas9
ctgaaacaagttatcgcagag

SEQ ID NO: 50770 - DNA, 20 bp, Artificial Sequence
  Synthetic: FXN 5 reverse 9:69036284-69036307; SpCas9
tgaaacaagttatcgcagag

SEQ ID NO: 50771 - DNA, 19 bp, Artificial Sequence
  Synthetic: FXN 5 reverse 9:69036285-69036307; SpCas9
gaaacaagttatcgcagag

SEQ ID NO: 50772 - DNA, 18 bp, Artificial Sequence
  Synthetic: FXN 5 reverse 9:69036286-69036307; SpCas9
aaacaagttatcgcagag

SEQ ID NO: 50773 - DNA, 25 bp, Artificial Sequence
  Synthetic: FXN 5 reverse 9:69036282-69036310; SpCas9
aatattactgaaacaagttatcgca

SEQ ID NO: 50774 - DNA, 24 bp, Artificial Sequence
  Synthetic: FXN 5 reverse 9:69036283-69036310; SpCas9
atattactgaaacaagttatcgca

SEQ ID NO: 50775 - DNA, 23 bp, Artificial Sequence
  Synthetic: FXN 5 reverse 9:69036284-69036310; SpCas9
tattactgaaacaagttatcgca

SEQ ID NO: 50776 - DNA, 22 bp, Artificial Sequence
  Synthetic: FXN 5 reverse 9:69036285-69036310; SpCas9
attactgaaacaagttatcgca

SEQ ID NO: 50777 - DNA, 21 bp, Artificial Sequence
  Synthetic: FXN 5 reverse 9:69036286-69036310; SpCas9
ttactgaaacaagttatcgca

SEQ ID NO: 50778 - DNA, 20 bp, Artificial Sequence
  Synthetic: FXN 5 reverse 9:69036287-69036310; SpCas9
tactgaaacaagttatcgca

SEQ ID NO: 50779 - DNA, 19 bp, Artificial Sequence
  Synthetic: FXN 5 reverse 9:69036288-69036310; SpCas9
actgaaacaagttatcgca

SEQ ID NO: 50780 - DNA, 18 bp, Artificial Sequence
  Synthetic: FXN 5 reverse 9:69036289-69036310; SpCas9
ctgaaacaagttatcgca

SEQ ID NO: 50781 - DNA, 25 bp, Artificial Sequence
  Synthetic: FXN 5 reverse 9:69036284-69036312; SpCas9
ttaatattactgaaacaagttatcg

SEQ ID NO: 50782 - DNA, 24 bp, Artificial Sequence
  Synthetic: FXN 5 reverse 9:69036285-69036312; SpCas9
taatattactgaaacaagttatcg

SEQ ID NO: 50783 - DNA, 23 bp, Artificial Sequence
  Synthetic: FXN 5 reverse 9:69036286-69036312; SpCas9
aatattactgaaacaagttatcg

SEQ ID NO: 50784 - DNA, 22 bp, Artificial Sequence
  Synthetic: FXN 5 reverse 9:69036287-69036312; SpCas9
atattactgaaacaagttatcg

SEQ ID NO: 50785 - DNA, 21 bp, Artificial Sequence
  Synthetic: FXN 5 reverse 9:69036288-69036312; SpCas9
tattactgaaacaagttatcg

SEQ ID NO: 50786 - DNA, 20 bp, Artificial Sequence
  Synthetic: FXN 5 reverse 9:69036289-69036312; SpCas9
attactgaaacaagttatcg

SEQ ID NO: 50787 - DNA, 19 bp, Artificial Sequence
  Synthetic: FXN 5 reverse 9:69036290-69036312; SpCas9
ttactgaaacaagttatcg

SEQ ID NO: 50788 - DNA, 18 bp, Artificial Sequence
  Synthetic: FXN 5 reverse 9:69036291-69036312; SpCas9
tactgaaacaagttatcg

SEQ ID NO: 50789 - DNA, 25 bp, Artificial Sequence
  Synthetic: FXN 5 forward 9:69036287-69036315; SpCas9
cgataacttgtttcagtaatattaa

SEQ ID NO: 50790 - DNA, 24 bp, Artificial Sequence
  Synthetic: FXN 5 forward 9:69036288-69036315; SpCas9
gataacttgtttcagtaatattaa

SEQ ID NO: 50791 - DNA, 23 bp, Artificial Sequence
  Synthetic: FXN 5 forward 9:69036289-69036315; SpCas9
ataacttgtttcagtaatattaa

SEQ ID NO: 50792 - DNA, 22 bp, Artificial Sequence
  Synthetic: FXN 5 forward 9:69036290-69036315; SpCas9
taacttgtttcagtaatattaa

SEQ ID NO: 50793 - DNA, 21 bp, Artificial Sequence
  Synthetic: FXN 5 forward 9:69036291-69036315; SpCas9
aacttgtttcagtaatattaa

SEQ ID NO: 50794 - DNA, 20 bp, Artificial Sequence
  Synthetic: FXN 5 forward 9:69036292-69036315; SpCas9
acttgtttcagtaatattaa

SEQ ID NO: 50795 - DNA, 19 bp, Artificial Sequence
  Synthetic: FXN 5 forward 9:69036293-69036315; SpCas9
cttgtttcagtaatattaa

SEQ ID NO: 50796 - DNA, 18 bp, Artificial Sequence
  Synthetic: FXN 5 forward 9:69036294-69036315; SpCas9
ttgtttcagtaatattaa

SEQ ID NO: 50797 - DNA, 25 bp, Artificial Sequence
  Synthetic: FXN 5 forward 9:69036291-69036319; SpCas9
aacttgtttcagtaatattaataga

SEQ ID NO: 50798 - DNA, 24 bp, Artificial Sequence
  Synthetic: FXN 5 forward 9:69036292-69036319; SpCas9
acttgtttcagtaatattaataga

SEQ ID NO: 50799 - DNA, 23 bp, Artificial Sequence
  Synthetic: FXN 5 forward 9:69036293-69036319; SpCas9
cttgtttcagtaatattaataga

SEQ ID NO: 50800 - DNA, 22 bp, Artificial Sequence
  Synthetic: FXN 5 forward 9:69036294-69036319; SpCas9
ttgtttcagtaatattaataga

SEQ ID NO: 50801 - DNA, 21 bp, Artificial Sequence
  Synthetic: FXN 5 forward 9:69036295-69036319; SpCas9
tgtttcagtaatattaataga

SEQ ID NO: 50802 - DNA, 20 bp, Artificial Sequence
  Synthetic: FXN 5 forward 9:69036296-69036319; SpCas9
gtttcagtaatattaataga

SEQ ID NO: 50803 - DNA, 19 bp, Artificial Sequence
  Synthetic: FXN 5 forward 9:69036297-69036319; SpCas9
tttcagtaatattaataga

SEQ ID NO: 50804 - DNA, 18 bp, Artificial Sequence
  Synthetic: FXN 5 forward 9:69036298-69036319; SpCas9
ttcagtaatattaataga

SEQ ID NO: 50805 - DNA, 25 bp, Artificial Sequence
  Synthetic: FXN 5 reverse 9:69036293-69036321; SpCas9
taccatctattaatattactgaaac

SEQ ID NO: 50806 - DNA, 24 bp, Artificial Sequence
  Synthetic: FXN 5 reverse 9:69036294-69036321; SpCas9
accatctattaatattactgaaac

SEQ ID NO: 50807 - DNA, 23 bp, Artificial Sequence
  Synthetic: FXN 5 reverse 9:69036295-69036321; SpCas9
ccatctattaatattactgaaac

SEQ ID NO: 50808 - DNA, 22 bp, Artificial Sequence
  Synthetic: FXN 5 reverse 9:69036296-69036321; SpCas9
catctattaatattactgaaac

SEQ ID NO: 50809 - DNA, 21 bp, Artificial Sequence
  Synthetic: FXN 5 reverse 9:69036297-69036321; SpCas9
atctattaatattactgaaac

SEQ ID NO: 50810 - DNA, 20 bp, Artificial Sequence
  Synthetic: FXN 5 reverse 9:69036298-69036321; SpCas9
tctattaatattactgaaac

SEQ ID NO: 50811 - DNA, 19 bp, Artificial Sequence
  Synthetic: FXN 5 reverse 9:69036299-69036321; SpCas9
ctattaatattactgaaac

SEQ ID NO: 50812 - DNA, 18 bp, Artificial Sequence
  Synthetic: FXN 5 reverse 9:69036300-69036321; SpCas9
tattaatattactgaaac

SEQ ID NO: 50813 - DNA, 25 bp, Artificial Sequence
  Synthetic: FXN 5 forward 9:69036301-69036329; SpCas9
agtaatattaatagatggtatctgc

SEQ ID NO: 50814 - DNA, 24 bp, Artificial Sequence
  Synthetic: FXN 5 forward 9:69036302-69036329; SpCas9
gtaatattaatagatggtatctgc

SEQ ID NO: 50815 - DNA, 23 bp, Artificial Sequence
  Synthetic: FXN 5 forward 9:69036303-69036329; SpCas9
taatattaatagatggtatctgc

SEQ ID NO: 50816 - DNA, 22 bp, Artificial Sequence
  Synthetic: FXN 5 forward 9:69036304-69036329; SpCas9
aatattaatagatggtatctgc

SEQ ID NO: 50817 - DNA, 21 bp, Artificial Sequence
  Synthetic: FXN 5 forward 9:69036305-69036329; SpCas9
atattaatagatggtatctgc

SEQ ID NO: 50818 - DNA, 20 bp, Artificial Sequence
  Synthetic: FXN 5 forward 9:69036306-69036329; SpCas9
tattaatagatggtatctgc

SEQ ID NO: 50819 - DNA, 19 bp, Artificial Sequence
  Synthetic: FXN 5 forward 9:69036307-69036329; SpCas9
attaatagatggtatctgc

SEQ ID NO: 50820 - DNA, 18 bp, Artificial Sequence
  Synthetic: FXN 5 forward 9:69036308-69036329; SpCas9
ttaatagatggtatctgc

SEQ ID NO: 50821 - DNA, 25 bp, Artificial Sequence
  Synthetic: FXN 5 reverse 9:69036322-69036350; SpCas9
cacattatgtgtatgtatatactag

SEQ ID NO: 50822 - DNA, 24 bp, Artificial Sequence
  Synthetic: FXN 5 reverse 9:69036323-69036350; SpCas9
acattatgtgtatgtatatactag

SEQ ID NO: 50823 - DNA, 23 bp, Artificial Sequence
  Synthetic: FXN 5 reverse 9:69036324-69036350; SpCas9
cattatgtgtatgtatatactag

SEQ ID NO: 50824 - DNA, 22 bp, Artificial Sequence
  Synthetic: FXN 5 reverse 9:69036325-69036350; SpCas9
attatgtgtatgtatatactag

SEQ ID NO: 50825 - DNA, 21 bp, Artificial Sequence
  Synthetic: FXN 5 reverse 9:69036326-69036350; SpCas9
ttatgtgtatgtatatactag

SEQ ID NO: 50826 - DNA, 20 bp, Artificial Sequence
  Synthetic: FXN 5 reverse 9:69036327-69036350; SpCas9
tatgtgtatgtatatactag

SEQ ID NO: 50827 - DNA, 19 bp, Artificial Sequence
  Synthetic: FXN 5 reverse 9:69036328-69036350; SpCas9
atgtgtatgtatatactag

SEQ ID NO: 50828 - DNA, 18 bp, Artificial Sequence
  Synthetic: FXN 5 reverse 9:69036329-69036350; SpCas9
tgtgtatgtatatactag

SEQ ID NO: 50829 - DNA, 25 bp, Artificial Sequence
  Synthetic: FXN 5 reverse 9:69036325-69036353; SpCas9
acacacattatgtgtatgtatatac

SEQ ID NO: 50830 - DNA, 24 bp, Artificial Sequence
  Synthetic: FXN 5 reverse 9:69036326-69036353; SpCas9
cacacattatgtgtatgtatatac

SEQ ID NO: 50831 - DNA, 23 bp, Artificial Sequence
  Synthetic: FXN 5 reverse 9:69036327-69036353; SpCas9
acacattatgtgtatgtatatac

SEQ ID NO: 50832 - DNA, 22 bp, Artificial Sequence
  Synthetic: FXN 5 reverse 9:69036328-69036353; SpCas9
cacattatgtgtatgtatatac

SEQ ID NO: 50833 - DNA, 21 bp, Artificial Sequence
  Synthetic: FXN 5 reverse 9:69036329-69036353; SpCas9
acattatgtgtatgtatatac

SEQ ID NO: 50834 - DNA, 20 bp, Artificial Sequence
  Synthetic: FXN 5 reverse 9:69036330-69036353; SpCas9
cattatgtgtatgtatatac

SEQ ID NO: 50835 - DNA, 19 bp, Artificial Sequence
  Synthetic: FXN 5 reverse 9:69036331-69036353; SpCas9
attatgtgtatgtatatac

SEQ ID NO: 50836 - DNA, 18 bp, Artificial Sequence
  Synthetic: FXN 5 reverse 9:69036332-69036353; SpCas9
ttatgtgtatgtatatac

SEQ ID NO: 50837 - DNA, 25 bp, Artificial Sequence
  Synthetic: FXN 5 forward 9:69036347-69036375; SpCas9
gtgtgtgtctgtgtgtatctgtata

SEQ ID NO: 50838 - DNA, 24 bp, Artificial Sequence
  Synthetic: FXN 5 forward 9:69036348-69036375; SpCas9
tgtgtgtctgtgtgtatctgtata

SEQ ID NO: 50839 - DNA, 23 bp, Artificial Sequence
  Synthetic: FXN 5 forward 9:69036349-69036375; SpCas9
gtgtgtctgtgtgtatctgtata

SEQ ID NO: 50840 - DNA, 22 bp, Artificial Sequence
  Synthetic: FXN 5 forward 9:69036350-69036375; SpCas9
tgtgtctgtgtgtatctgtata

SEQ ID NO: 50841 - DNA, 21 bp, Artificial Sequence
  Synthetic: FXN 5 forward 9:69036351-69036375; SpCas9
gtgtctgtgtgtatctgtata

SEQ ID NO: 50842 - DNA, 20 bp, Artificial Sequence
  Synthetic: FXN 5 forward 9:69036352-69036375; SpCas9
tgtctgtgtgtatctgtata

SEQ ID NO: 50843 - DNA, 19 bp, Artificial Sequence
  Synthetic: FXN 5 forward 9:69036353-69036375; SpCas9
gtctgtgtgtatctgtata

SEQ ID NO: 50844 - DNA, 18 bp, Artificial Sequence
  Synthetic: FXN 5 forward 9:69036354-69036375; SpCas9
tctgtgtgtatctgtata

SEQ ID NO: 50845 - DNA, 25 bp, Artificial Sequence
  Synthetic: FXN 5 reverse 9:69036355-69036383; SpCas9
cacacacgctatatacagatacaca

SEQ ID NO: 50846 - DNA, 24 bp, Artificial Sequence
  Synthetic: FXN 5 reverse 9:69036356-69036383; SpCas9
acacacgctatatacagatacaca

SEQ ID NO: 50847 - DNA, 23 bp, Artificial Sequence
  Synthetic: FXN 5 reverse 9:69036357-69036383; SpCas9
cacacgctatatacagatacaca

SEQ ID NO: 50848 - DNA, 22 bp, Artificial Sequence
  Synthetic: FXN 5 reverse 9:69036358-69036383; SpCas9
acacgctatatacagatacaca

SEQ ID NO: 50849 - DNA, 21 bp, Artificial Sequence
  Synthetic: FXN 5 reverse 9:69036359-69036383; SpCas9
cacgctatatacagatacaca

SEQ ID NO: 50850 - DNA, 20 bp, Artificial Sequence
  Synthetic: FXN 5 reverse 9:69036360-69036383; SpCas9
acgctatatacagatacaca

SEQ ID NO: 50851 - DNA, 19 bp, Artificial Sequence
  Synthetic: FXN 5 reverse 9:69036361-69036383; SpCas9
cgctatatacagatacaca

SEQ ID NO: 50852 - DNA, 18 bp, Artificial Sequence
  Synthetic: FXN 5 reverse 9:69036362-69036383; SpCas9
gctatatacagatacaca

SEQ ID NO: 50853 - DNA, 25 bp, Artificial Sequence
  Synthetic: FXN 5 reverse 9:69036365-69036393; SpCas9
acacacacaacacacacgctatata

SEQ ID NO: 50854 - DNA, 24 bp, Artificial Sequence
  Synthetic: FXN 5 reverse 9:69036366-69036393; SpCas9
cacacacaacacacacgctatata

SEQ ID NO: 50855 - DNA, 23 bp, Artificial Sequence
  Synthetic: FXN 5 reverse 9:69036367-69036393; SpCas9
acacacaacacacacgctatata

SEQ ID NO: 50856 - DNA, 22 bp, Artificial Sequence
  Synthetic: FXN 5 reverse 9:69036368-69036393; SpCas9
cacacaacacacacgctatata

SEQ ID NO: 50857 - DNA, 21 bp, Artificial Sequence
  Synthetic: FXN 5 reverse 9:69036369-69036393; SpCas9
acacaacacacacgctatata

SEQ ID NO: 50858 - DNA, 20 bp, Artificial Sequence
  Synthetic: FXN 5 reverse 9:69036370-69036393; SpCas9
cacaacacacacgctatata

SEQ ID NO: 50859 - DNA, 19 bp, Artificial Sequence
  Synthetic: FXN 5 reverse 9:69036371-69036393; SpCas9
acaacacacacgctatata

SEQ ID NO: 50860 - DNA, 18 bp, Artificial Sequence
  Synthetic: FXN 5 reverse 9:69036372-69036393; SpCas9
caacacacacgctatata

SEQ ID NO: 50861 - DNA, 25 bp, Artificial Sequence
  Synthetic: FXN 5 forward 9:69036381-69036409; SpCas9
tgttgtgtgtgtgtgtttgcgcgca

SEQ ID NO: 50862 - DNA, 24 bp, Artificial Sequence
  Synthetic: FXN 5 forward 9:69036382-69036409; SpCas9
gttgtgtgtgtgtgtttgcgcgca

SEQ ID NO: 50863 - DNA, 23 bp, Artificial Sequence
  Synthetic: FXN 5 forward 9:69036383-69036409; SpCas9
ttgtgtgtgtgtgtttgcgcgca

SEQ ID NO: 50864 - DNA, 22 bp, Artificial Sequence
  Synthetic: FXN 5 forward 9:69036384-69036409; SpCas9
tgtgtgtgtgtgtttgcgcgca

SEQ ID NO: 50865 - DNA, 21 bp, Artificial Sequence
  Synthetic: FXN 5 forward 9:69036385-69036409; SpCas9
gtgtgtgtgtgtttgcgcgca

SEQ ID NO: 50866 - DNA, 20 bp, Artificial Sequence
  Synthetic: FXN 5 forward 9:69036386-69036409; SpCas9
tgtgtgtgtgtttgcgcgca

SEQ ID NO: 50867 - DNA, 19 bp, Artificial Sequence
  Synthetic: FXN 5 forward 9:69036387-69036409; SpCas9
gtgtgtgtgtttgcgcgca

SEQ ID NO: 50868 - DNA, 18 bp, Artificial Sequence
  Synthetic: FXN 5 forward 9:69036388-69036409; SpCas9
tgtgtgtgtttgcgcgca

SEQ ID NO: 50869 - DNA, 25 bp, Artificial Sequence
  Synthetic: FXN 5 forward 9:69036382-69036410; SpCas9
gttgtgtgtgtgtgtttgcgcgcac

SEQ ID NO: 50870 - DNA, 24 bp, Artificial Sequence
  Synthetic: FXN 5 forward 9:69036383-69036410; SpCas9
ttgtgtgtgtgtgtttgcgcgcac

SEQ ID NO: 50871 - DNA, 23 bp, Artificial Sequence
  Synthetic: FXN 5 forward 9:69036384-69036410; SpCas9
tgtgtgtgtgtgtttgcgcgcac

SEQ ID NO: 50872 - DNA, 22 bp, Artificial Sequence
  Synthetic: FXN 5 forward 9:69036385-69036410; SpCas9
gtgtgtgtgtgtttgcgcgcac

SEQ ID NO: 50873 - DNA, 21 bp, Artificial Sequence
  Synthetic: FXN 5 forward 9:69036386-69036410; SpCas9
tgtgtgtgtgtttgcgcgcac

SEQ ID NO: 50874 - DNA, 20 bp, Artificial Sequence
  Synthetic: FXN 5 forward 9:69036387-69036410; SpCas9
gtgtgtgtgtttgcgcgcac

SEQ ID NO: 50875 - DNA, 19 bp, Artificial Sequence
  Synthetic: FXN 5 forward 9:69036388-69036410; SpCas9
tgtgtgtgtttgcgcgcac

SEQ ID NO: 50876 - DNA, 18 bp, Artificial Sequence
  Synthetic: FXN 5 forward 9:69036389-69036410; SpCas9
gtgtgtgtttgcgcgcac

SEQ ID NO: 50877 - DNA, 25 bp, Artificial Sequence
  Synthetic: FXN 5 forward 9:69036407-69036435; SpCas9
gggcgcgcgcacacctaatattttc

SEQ ID NO: 50878 - DNA, 24 bp, Artificial Sequence
  Synthetic: FXN 5 forward 9:69036408-69036435; SpCas9
ggcgcgcgcacacctaatattttc

SEQ ID NO: 50879 - DNA, 23 bp, Artificial Sequence
  Synthetic: FXN 5 forward 9:69036409-69036435; SpCas9
gcgcgcgcacacctaatattttc

SEQ ID NO: 50880 - DNA, 22 bp, Artificial Sequence
  Synthetic: FXN 5 forward 9:69036410-69036435; SpCas9
cgcgcgcacacctaatattttc

SEQ ID NO: 50881 - DNA, 21 bp, Artificial Sequence
  Synthetic: FXN 5 forward 9:69036411-69036435; SpCas9
gcgcgcacacctaatattttc

SEQ ID NO: 50882 - DNA, 20 bp, Artificial Sequence
  Synthetic: FXN 5 forward 9:69036412-69036435; SpCas9
cgcgcacacctaatattttc

SEQ ID NO: 50883 - DNA, 19 bp, Artificial Sequence
  Synthetic: FXN 5 forward 9:69036413-69036435; SpCas9
gcgcacacctaatattttc

SEQ ID NO: 50884 - DNA, 18 bp, Artificial Sequence
  Synthetic: FXN 5 forward 9:69036414-69036435; SpCas9
cgcacacctaatattttc

SEQ ID NO: 50885 - DNA, 25 bp, Artificial Sequence
  Synthetic: FXN 5 forward 9:69036408-69036436; SpCas9
ggcgcgcgcacacctaatattttca

SEQ ID NO: 50886 - DNA, 24 bp, Artificial Sequence
  Synthetic: FXN 5 forward 9:69036409-69036436; SpCas9
gcgcgcgcacacctaatattttca

SEQ ID NO: 50887 - DNA, 23 bp, Artificial Sequence
  Synthetic: FXN 5 forward 9:69036410-69036436; SpCas9
cgcgcgcacacctaatattttca

SEQ ID NO: 50888 - DNA, 22 bp, Artificial Sequence
  Synthetic: FXN 5 forward 9:69036411-69036436; SpCas9
gcgcgcacacctaatattttca

SEQ ID NO: 50889 - DNA, 21 bp, Artificial Sequence
  Synthetic: FXN 5 forward 9:69036412-69036436; SpCas9
cgcgcacacctaatattttca

SEQ ID NO: 50890 - DNA, 20 bp, Artificial Sequence
  Synthetic: FXN 5 forward 9:69036413-69036436; SpCas9
gcgcacacctaatattttca

SEQ ID NO: 50891 - DNA, 19 bp, Artificial Sequence
  Synthetic: FXN 5 forward 9:69036414-69036436; SpCas9
cgcacacctaatattttca

SEQ ID NO: 50892 - DNA, 18 bp, Artificial Sequence
  Synthetic: FXN 5 forward 9:69036415-69036436; SpCas9
gcacacctaatattttca

SEQ ID NO: 50893 - DNA, 25 bp, Artificial Sequence
  Synthetic: FXN 5 forward 9:69036412-69036440; SpCas9
cgcgcacacctaatattttcaaggc

SEQ ID NO: 50894 - DNA, 24 bp, Artificial Sequence
  Synthetic: FXN 5 forward 9:69036413-69036440; SpCas9
gcgcacacctaatattttcaaggc

SEQ ID NO: 50895 - DNA, 23 bp, Artificial Sequence
  Synthetic: FXN 5 forward 9:69036414-69036440; SpCas9
cgcacacctaatattttcaaggc

SEQ ID NO: 50896 - DNA, 22 bp, Artificial Sequence
  Synthetic: FXN 5 forward 9:69036415-69036440; SpCas9
gcacacctaatattttcaaggc

SEQ ID NO: 50897 - DNA, 21 bp, Artificial Sequence
  Synthetic: FXN 5 forward 9:69036416-69036440; SpCas9
cacacctaatattttcaaggc

SEQ ID NO: 50898 - DNA, 20 bp, Artificial Sequence
  Synthetic: FXN 5 forward 9:69036417-69036440; SpCas9
acacctaatattttcaaggc

SEQ ID NO: 50899 - DNA, 19 bp, Artificial Sequence
  Synthetic: FXN 5 forward 9:69036418-69036440; SpCas9
cacctaatattttcaaggc

SEQ ID NO: 50900 - DNA, 18 bp, Artificial Sequence
  Synthetic: FXN 5 forward 9:69036419-69036440; SpCas9
acctaatattttcaaggc

SEQ ID NO: 50901 - DNA, 25 bp, Artificial Sequence
  Synthetic: FXN 5 reverse 9:69036420-69036448; SpCas9
aaaaaaatccagccttgaaaatatt

SEQ ID NO: 50902 - DNA, 24 bp, Artificial Sequence
  Synthetic: FXN 5 reverse 9:69036421-69036448; SpCas9
aaaaaatccagccttgaaaatatt

SEQ ID NO: 50903 - DNA, 23 bp, Artificial Sequence
  Synthetic: FXN 5 reverse 9:69036422-69036448; SpCas9
aaaaatccagccttgaaaatatt

SEQ ID NO: 50904 - DNA, 22 bp, Artificial Sequence
  Synthetic: FXN 5 reverse 9:69036423-69036448; SpCas9
aaaatccagccttgaaaatatt

SEQ ID NO: 50905 - DNA, 21 bp, Artificial Sequence
  Synthetic: FXN 5 reverse 9:69036424-69036448; SpCas9
aaatccagccttgaaaatatt

SEQ ID NO: 50906 - DNA, 20 bp, Artificial Sequence
  Synthetic: FXN 5 reverse 9:69036425-69036448; SpCas9
aatccagccttgaaaatatt

SEQ ID NO: 50907 - DNA, 19 bp, Artificial Sequence
  Synthetic: FXN 5 reverse 9:69036426-69036448; SpCas9
atccagccttgaaaatatt

SEQ ID NO: 50908 - DNA, 18 bp, Artificial Sequence
  Synthetic: FXN 5 reverse 9:69036427-69036448; SpCas9
tccagccttgaaaatatt

SEQ ID NO: 50909 - DNA, 25 bp, Artificial Sequence
  Synthetic: FXN 5 reverse 9:69036421-69036449; SpCas9
caaaaaaatccagccttgaaaatat

SEQ ID NO: 50910 - DNA, 24 bp, Artificial Sequence
  Synthetic: FXN 5 reverse 9:69036422-69036449; SpCas9
aaaaaaatccagccttgaaaatat

SEQ ID NO: 50911 - DNA, 23 bp, Artificial Sequence
  Synthetic: FXN 5 reverse 9:69036423-69036449; SpCas9
aaaaaatccagccttgaaaatat

SEQ ID NO: 50912 - DNA, 22 bp, Artificial Sequence
  Synthetic: FXN 5 reverse 9:69036424-69036449; SpCas9
aaaaatccagccttgaaaatat

SEQ ID NO: 50913 - DNA, 21 bp, Artificial Sequence
  Synthetic: FXN 5 reverse 9:69036425-69036449; SpCas9
aaaatccagccttgaaaatat

SEQ ID NO: 50914 - DNA, 20 bp, Artificial Sequence
  Synthetic: FXN 5 reverse 9:69036426-69036449; SpCas9
aaatccagccttgaaaatat

SEQ ID NO: 50915 - DNA, 19 bp, Artificial Sequence
  Synthetic: FXN 5 reverse 9:69036427-69036449; SpCas9
aatccagccttgaaaatat

SEQ ID NO: 50916 - DNA, 18 bp, Artificial Sequence
  Synthetic: FXN 5 reverse 9:69036428-69036449; SpCas9
atccagccttgaaaatat

SEQ ID NO: 50917 - DNA, 25 bp, Artificial Sequence
  Synthetic: FXN 5 reverse 9:69036436-69036464; SpCas9
ggaaagcatttcgttcaaaaaaatc

SEQ ID NO: 50918 - DNA, 24 bp, Artificial Sequence
  Synthetic: FXN 5 reverse 9:69036437-69036464; SpCas9
gaaagcatttcgttcaaaaaaatc

SEQ ID NO: 50919 - DNA, 23 bp, Artificial Sequence
  Synthetic: FXN 5 reverse 9:69036438-69036464; SpCas9
aaagcatttcgttcaaaaaaatc

SEQ ID NO: 50920 - DNA, 22 bp, Artificial Sequence
  Synthetic: FXN 5 reverse 9:69036439-69036464; SpCas9
aagcatttcgttcaaaaaaatc

SEQ ID NO: 50921 - DNA, 21 bp, Artificial Sequence
  Synthetic: FXN 5 reverse 9:69036440-69036464; SpCas9
agcatttcgttcaaaaaaatc

SEQ ID NO: 50922 - DNA, 20 bp, Artificial Sequence
  Synthetic: FXN 5 reverse 9:69036441-69036464; SpCas9
gcatttcgttcaaaaaaatc

SEQ ID NO: 50923 - DNA, 19 bp, Artificial Sequence
  Synthetic: FXN 5 reverse 9:69036442-69036464; SpCas9
catttcgttcaaaaaaatc

SEQ ID NO: 50924 - DNA, 18 bp, Artificial Sequence
  Synthetic: FXN 5 reverse 9:69036443-69036464; SpCas9
atttcgttcaaaaaaatc

SEQ ID NO: 50925 - DNA, 25 bp, Artificial Sequence
  Synthetic: FXN 5 forward 9:69036439-69036467; SpCas9
gatttttttgaacgaaatgctttcc

SEQ ID NO: 50926 - DNA, 24 bp, Artificial Sequence
  Synthetic: FXN 5 forward 9:69036440-69036467; SpCas9
atttttttgaacgaaatgctttcc

SEQ ID NO: 50927 - DNA, 23 bp, Artificial Sequence
  Synthetic: FXN 5 forward 9:69036441-69036467; SpCas9
tttttttgaacgaaatgctttcc

SEQ ID NO: 50928 - DNA, 22 bp, Artificial Sequence
  Synthetic: FXN 5 forward 9:69036442-69036467; SpCas9
ttttttgaacgaaatgctttcc

SEQ ID NO: 50929 - DNA, 21 bp, Artificial Sequence
  Synthetic: FXN 5 forward 9:69036443-69036467; SpCas9
tttttgaacgaaatgctttcc

SEQ ID NO: 50930 - DNA, 20 bp, Artificial Sequence
  Synthetic: FXN 5 forward 9:69036444-69036467; SpCas9
ttttgaacgaaatgctttcc

SEQ ID NO: 50931 - DNA, 19 bp, Artificial Sequence
  Synthetic: FXN 5 forward 9:69036445-69036467; SpCas9
tttgaacgaaatgctttcc

SEQ ID NO: 50932 - DNA, 18 bp, Artificial Sequence
  Synthetic: FXN 5 forward 9:69036446-69036467; SpCas9
ttgaacgaaatgctttcc

SEQ ID NO: 50933 - DNA, 25 bp, Artificial Sequence
  Synthetic: FXN 5 forward 9:69036445-69036473; SpCas9
tttgaacgaaatgctttcctggaac

SEQ ID NO: 50934 - DNA, 24 bp, Artificial Sequence
  Synthetic: FXN 5 forward 9:69036446-69036473; SpCas9
ttgaacgaaatgctttcctggaac

SEQ ID NO: 50935 - DNA, 23 bp, Artificial Sequence
  Synthetic: FXN 5 forward 9:69036447-69036473; SpCas9
tgaacgaaatgctttcctggaac

SEQ ID NO: 50936 - DNA, 22 bp, Artificial Sequence
  Synthetic: FXN 5 forward 9:69036448-69036473; SpCas9
gaacgaaatgctttcctggaac

SEQ ID NO: 50937 - DNA, 21 bp, Artificial Sequence
  Synthetic: FXN 5 forward 9:69036449-69036473; SpCas9
aacgaaatgctttcctggaac

SEQ ID NO: 50938 - DNA, 20 bp, Artificial Sequence
  Synthetic: FXN 5 forward 9:69036450-69036473; SpCas9
acgaaatgctttcctggaac

SEQ ID NO: 50939 - DNA, 19 bp, Artificial Sequence
  Synthetic: FXN 5 forward 9:69036451-69036473; SpCas9
cgaaatgctttcctggaac

SEQ ID NO: 50940 - DNA, 18 bp, Artificial Sequence
  Synthetic: FXN 5 forward 9:69036452-69036473; SpCas9
gaaatgctttcctggaac

SEQ ID NO: 50941 - DNA, 25 bp, Artificial Sequence
  Synthetic: FXN 5 forward 9:69036446-69036474; SpCas9
ttgaacgaaatgctttcctggaacg

SEQ ID NO: 50942 - DNA, 24 bp, Artificial Sequence
  Synthetic: FXN 5 forward 9:69036447-69036474; SpCas9
tgaacgaaatgctttcctggaacg

SEQ ID NO: 50943 - DNA, 23 bp, Artificial Sequence
  Synthetic: FXN 5 forward 9:69036448-69036474; SpCas9
gaacgaaatgctttcctggaacg

SEQ ID NO: 50944 - DNA, 22 bp, Artificial Sequence
  Synthetic: FXN 5 forward 9:69036449-69036474; SpCas9
aacgaaatgctttcctggaacg

SEQ ID NO: 50945 - DNA, 21 bp, Artificial Sequence
  Synthetic: FXN 5 forward 9:69036450-69036474; SpCas9
acgaaatgctttcctggaacg

SEQ ID NO: 50946 - DNA, 20 bp, Artificial Sequence
  Synthetic: FXN 5 forward 9:69036451-69036474; SpCas9
cgaaatgctttcctggaacg

SEQ ID NO: 50947 - DNA, 19 bp, Artificial Sequence
  Synthetic: FXN 5 forward 9:69036452-69036474; SpCas9
gaaatgctttcctggaacg

SEQ ID NO: 50948 - DNA, 18 bp, Artificial Sequence
  Synthetic: FXN 5 forward 9:69036453-69036474; SpCas9
aaatgctttcctggaacg

SEQ ID NO: 50949 - DNA, 25 bp, Artificial Sequence
  Synthetic: FXN 5 forward 9:69036458-69036486; SpCas9
ctttcctggaacgaggtgaaacttt

SEQ ID NO: 50950 - DNA, 24 bp, Artificial Sequence
  Synthetic: FXN 5 forward 9:69036459-69036486; SpCas9
tttcctggaacgaggtgaaacttt

SEQ ID NO: 50951 - DNA, 23 bp, Artificial Sequence
  Synthetic: FXN 5 forward 9:69036460-69036486; SpCas9
ttcctggaacgaggtgaaacttt

SEQ ID NO: 50952 - DNA, 22 bp, Artificial Sequence
  Synthetic: FXN 5 forward 9:69036461-69036486; SpCas9
tcctggaacgaggtgaaacttt

SEQ ID NO: 50953 - DNA, 21 bp, Artificial Sequence
  Synthetic: FXN 5 forward 9:69036462-69036486; SpCas9
cctggaacgaggtgaaacttt

SEQ ID NO: 50954 - DNA, 20 bp, Artificial Sequence
  Synthetic: FXN 5 forward 9:69036463-69036486; SpCas9
ctggaacgaggtgaaacttt

SEQ ID NO: 50955 - DNA, 19 bp, Artificial Sequence
  Synthetic: FXN 5 forward 9:69036464-69036486; SpCas9
tggaacgaggtgaaacttt

SEQ ID NO: 50956 - DNA, 18 bp, Artificial Sequence
  Synthetic: FXN 5 forward 9:69036465-69036486; SpCas9
ggaacgaggtgaaacttt

SEQ ID NO: 50957 - DNA, 25 bp, Artificial Sequence
  Synthetic: FXN 5 reverse 9:69036458-69036486; SpCas9
ctgaaagtttcacctcgttccagga

SEQ ID NO: 50958 - DNA, 24 bp, Artificial Sequence
  Synthetic: FXN 5 reverse 9:69036459-69036486; SpCas9
tgaaagtttcacctcgttccagga

SEQ ID NO: 50959 - DNA, 23 bp, Artificial Sequence
  Synthetic: FXN 5 reverse 9:69036460-69036486; SpCas9
gaaagtttcacctcgttccagga

SEQ ID NO: 50960 - DNA, 22 bp, Artificial Sequence
  Synthetic: FXN 5 reverse 9:69036461-69036486; SpCas9
aaagtttcacctcgttccagga

SEQ ID NO: 50961 - DNA, 21 bp, Artificial Sequence
  Synthetic: FXN 5 reverse 9:69036462-69036486; SpCas9
aagtttcacctcgttccagga

SEQ ID NO: 50962 - DNA, 20 bp, Artificial Sequence
  Synthetic: FXN 5 reverse 9:69036463-69036486; SpCas9
agtttcacctcgttccagga

SEQ ID NO: 50963 - DNA, 19 bp, Artificial Sequence
  Synthetic: FXN 5 reverse 9:69036464-69036486; SpCas9
gtttcacctcgttccagga

SEQ ID NO: 50964 - DNA, 18 bp, Artificial Sequence
  Synthetic: FXN 5 reverse 9:69036465-69036486; SpCas9
tttcacctcgttccagga

SEQ ID NO: 50965 - DNA, 25 bp, Artificial Sequence
  Synthetic: FXN 5 forward 9:69036460-69036488; SpCas9
ttcctggaacgaggtgaaactttca

SEQ ID NO: 50966 - DNA, 24 bp, Artificial Sequence
  Synthetic: FXN 5 forward 9:69036461-69036488; SpCas9
tcctggaacgaggtgaaactttca

SEQ ID NO: 50967 - DNA, 23 bp, Artificial Sequence
  Synthetic: FXN 5 forward 9:69036462-69036488; SpCas9
cctggaacgaggtgaaactttca

SEQ ID NO: 50968 - DNA, 22 bp, Artificial Sequence
  Synthetic: FXN 5 forward 9:69036463-69036488; SpCas9
ctggaacgaggtgaaactttca

SEQ ID NO: 50969 - DNA, 21 bp, Artificial Sequence
  Synthetic: FXN 5 forward 9:69036464-69036488; SpCas9
tggaacgaggtgaaactttca

SEQ ID NO: 50970 - DNA, 20 bp, Artificial Sequence
  Synthetic: FXN 5 forward 9:69036465-69036488; SpCas9
ggaacgaggtgaaactttca

SEQ ID NO: 50971 - DNA, 19 bp, Artificial Sequence
  Synthetic: FXN 5 forward 9:69036466-69036488; SpCas9
gaacgaggtgaaactttca

SEQ ID NO: 50972 - DNA, 18 bp, Artificial Sequence
  Synthetic: FXN 5 forward 9:69036467-69036488; SpCas9
aacgaggtgaaactttca

SEQ ID NO: 50973 - DNA, 25 bp, Artificial Sequence
  Synthetic: FXN 5 reverse 9:69036462-69036490; SpCas9
agctctgaaagtttcacctcgttcc

SEQ ID NO: 50974 - DNA, 24 bp, Artificial Sequence
  Synthetic: FXN 5 reverse 9:69036463-69036490; SpCas9
gctctgaaagtttcacctcgttcc

SEQ ID NO: 50975 - DNA, 23 bp, Artificial Sequence
  Synthetic: FXN 5 reverse 9:69036464-69036490; SpCas9
ctctgaaagtttcacctcgttcc

SEQ ID NO: 50976 - DNA, 22 bp, Artificial Sequence
  Synthetic: FXN 5 reverse 9:69036465-69036490; SpCas9
tctgaaagtttcacctcgttcc

SEQ ID NO: 50977 - DNA, 21 bp, Artificial Sequence
  Synthetic: FXN 5 reverse 9:69036466-69036490; SpCas9
ctgaaagtttcacctcgttcc

SEQ ID NO: 50978 - DNA, 20 bp, Artificial Sequence
  Synthetic: FXN 5 reverse 9:69036467-69036490; SpCas9
tgaaagtttcacctcgttcc

SEQ ID NO: 50979 - DNA, 19 bp, Artificial Sequence
  Synthetic: FXN 5 reverse 9:69036468-69036490; SpCas9
gaaagtttcacctcgttcc

SEQ ID NO: 50980 - DNA, 18 bp, Artificial Sequence
  Synthetic: FXN 5 reverse 9:69036469-69036490; SpCas9
aaagtttcacctcgttcc

SEQ ID NO: 50981 - DNA, 25 bp, Artificial Sequence
  Synthetic: FXN 5 reverse 9:69036463-69036491; SpCas9
cagctctgaaagtttcacctcgttc

SEQ ID NO: 50982 - DNA, 24 bp, Artificial Sequence
  Synthetic: FXN 5 reverse 9:69036464-69036491; SpCas9
agctctgaaagtttcacctcgttc

SEQ ID NO: 50983 - DNA, 23 bp, Artificial Sequence
  Synthetic: FXN 5 reverse 9:69036465-69036491; SpCas9
gctctgaaagtttcacctcgttc

SEQ ID NO: 50984 - DNA, 22 bp, Artificial Sequence
  Synthetic: FXN 5 reverse 9:69036466-69036491; SpCas9
ctctgaaagtttcacctcgttc

SEQ ID NO: 50985 - DNA, 21 bp, Artificial Sequence
  Synthetic: FXN 5 reverse 9:69036467-69036491; SpCas9
tctgaaagtttcacctcgttc

SEQ ID NO: 50986 - DNA, 20 bp, Artificial Sequence
  Synthetic: FXN 5 reverse 9:69036468-69036491; SpCas9
ctgaaagtttcacctcgttc

SEQ ID NO: 50987 - DNA, 19 bp, Artificial Sequence
  Synthetic: FXN 5 reverse 9:69036469-69036491; SpCas9
tgaaagtttcacctcgttc

SEQ ID NO: 50988 - DNA, 18 bp, Artificial Sequence
  Synthetic: FXN 5 reverse 9:69036470-69036491; SpCas9
gaaagtttcacctcgttc

SEQ ID NO: 50989 - DNA, 25 bp, Artificial Sequence
  Synthetic: FXN 5 forward 9:69036466-69036494; SpCas9
gaacgaggtgaaactttcagagctg

SEQ ID NO: 50990 - DNA, 24 bp, Artificial Sequence
  Synthetic: FXN 5 forward 9:69036467-69036494; SpCas9
aacgaggtgaaactttcagagctg

SEQ ID NO: 50991 - DNA, 23 bp, Artificial Sequence
  Synthetic: FXN 5 forward 9:69036468-69036494; SpCas9
acgaggtgaaactttcagagctg

SEQ ID NO: 50992 - DNA, 22 bp, Artificial Sequence
  Synthetic: FXN 5 forward 9:69036469-69036494; SpCas9
cgaggtgaaactttcagagctg

SEQ ID NO: 50993 - DNA, 21 bp, Artificial Sequence
  Synthetic: FXN 5 forward 9:69036470-69036494; SpCas9
gaggtgaaactttcagagctg

SEQ ID NO: 50994 - DNA, 20 bp, Artificial Sequence
  Synthetic: FXN 5 forward 9:69036471-69036494; SpCas9
aggtgaaactttcagagctg

SEQ ID NO: 50995 - DNA, 19 bp, Artificial Sequence
  Synthetic: FXN 5 forward 9:69036472-69036494; SpCas9
ggtgaaactttcagagctg

SEQ ID NO: 50996 - DNA, 18 bp, Artificial Sequence
  Synthetic: FXN 5 forward 9:69036473-69036494; SpCas9
gtgaaactttcagagctg

SEQ ID NO: 50997 - DNA, 25 bp, Artificial Sequence
  Synthetic: FXN 5 forward 9:69036471-69036499; SpCas9
aggtgaaactttcagagctgcagaa

SEQ ID NO: 50998 - DNA, 24 bp, Artificial Sequence
  Synthetic: FXN 5 forward 9:69036472-69036499; SpCas9
ggtgaaactttcagagctgcagaa

SEQ ID NO: 50999 - DNA, 23 bp, Artificial Sequence
  Synthetic: FXN 5 forward 9:69036473-69036499; SpCas9
gtgaaactttcagagctgcagaa

SEQ ID NO: 51000 - DNA, 22 bp, Artificial Sequence
  Synthetic: FXN 5 forward 9:69036474-69036499; SpCas9
tgaaactttcagagctgcagaa

SEQ ID NO: 51001 - DNA, 21 bp, Artificial Sequence
  Synthetic: FXN 5 forward 9:69036475-69036499; SpCas9
gaaactttcagagctgcagaa

SEQ ID NO: 51002 - DNA, 20 bp, Artificial Sequence
  Synthetic: FXN 5 forward 9:69036476-69036499; SpCas9
aaactttcagagctgcagaa

SEQ ID NO: 51003 - DNA, 19 bp, Artificial Sequence
  Synthetic: FXN 5 forward 9:69036477-69036499; SpCas9
aactttcagagctgcagaa

SEQ ID NO: 51004 - DNA, 18 bp, Artificial Sequence
  Synthetic: FXN 5 forward 9:69036478-69036499; SpCas9
actttcagagctgcagaa

SEQ ID NO: 51005 - DNA, 25 bp, Artificial Sequence
  Synthetic: FXN 5 forward 9:69036475-69036503; SpCas9
gaaactttcagagctgcagaatagc

SEQ ID NO: 51006 - DNA, 24 bp, Artificial Sequence
  Synthetic: FXN 5 forward 9:69036476-69036503; SpCas9
aaactttcagagctgcagaatagc

SEQ ID NO: 51007 - DNA, 23 bp, Artificial Sequence
  Synthetic: FXN 5 forward 9:69036477-69036503; SpCas9
aactttcagagctgcagaatagc

SEQ ID NO: 51008 - DNA, 22 bp, Artificial Sequence
  Synthetic: FXN 5 forward 9:69036478-69036503; SpCas9
actttcagagctgcagaatagc

SEQ ID NO: 51009 - DNA, 21 bp, Artificial Sequence
  Synthetic: FXN 5 forward 9:69036479-69036503; SpCas9
ctttcagagctgcagaatagc

SEQ ID NO: 51010 - DNA, 20 bp, Artificial Sequence
  Synthetic: FXN 5 forward 9:69036480-69036503; SpCas9
tttcagagctgcagaatagc

SEQ ID NO: 51011 - DNA, 19 bp, Artificial Sequence
  Synthetic: FXN 5 forward 9:69036481-69036503; SpCas9
ttcagagctgcagaatagc

SEQ ID NO: 51012 - DNA, 18 bp, Artificial Sequence
  Synthetic: FXN 5 forward 9:69036482-69036503; SpCas9
tcagagctgcagaatagc

SEQ ID NO: 51013 - DNA, 25 bp, Artificial Sequence
  Synthetic: FXN 5 forward 9:69036477-69036505; SpCas9
aactttcagagctgcagaatagcta

SEQ ID NO: 51014 - DNA, 24 bp, Artificial Sequence
  Synthetic: FXN 5 forward 9:69036478-69036505; SpCas9
actttcagagctgcagaatagcta

SEQ ID NO: 51015 - DNA, 23 bp, Artificial Sequence
  Synthetic: FXN 5 forward 9:69036479-69036505; SpCas9
ctttcagagctgcagaatagcta

SEQ ID NO: 51016 - DNA, 22 bp, Artificial Sequence
  Synthetic: FXN 5 forward 9:69036480-69036505; SpCas9
tttcagagctgcagaatagcta

SEQ ID NO: 51017 - DNA, 21 bp, Artificial Sequence
  Synthetic: FXN 5 forward 9:69036481-69036505; SpCas9
ttcagagctgcagaatagcta

SEQ ID NO: 51018 - DNA, 20 bp, Artificial Sequence
  Synthetic: FXN 5 forward 9:69036482-69036505; SpCas9
tcagagctgcagaatagcta

SEQ ID NO: 51019 - DNA, 19 bp, Artificial Sequence
  Synthetic: FXN 5 forward 9:69036483-69036505; SpCas9
cagagctgcagaatagcta

SEQ ID NO: 51020 - DNA, 18 bp, Artificial Sequence
  Synthetic: FXN 5 forward 9:69036484-69036505; SpCas9
agagctgcagaatagcta

SEQ ID NO: 51021 - DNA, 25 bp, Artificial Sequence
  Synthetic: FXN 5 reverse 9:69036479-69036507; SpCas9
tgctctagctattctgcagctctga

SEQ ID NO: 51022 - DNA, 24 bp, Artificial Sequence
  Synthetic: FXN 5 reverse 9:69036480-69036507; SpCas9
gctctagctattctgcagctctga

SEQ ID NO: 51023 - DNA, 23 bp, Artificial Sequence
  Synthetic: FXN 5 reverse 9:69036481-69036507; SpCas9
ctctagctattctgcagctctga

SEQ ID NO: 51024 - DNA, 22 bp, Artificial Sequence
  Synthetic: FXN 5 reverse 9:69036482-69036507; SpCas9
tctagctattctgcagctctga

SEQ ID NO: 51025 - DNA, 21 bp, Artificial Sequence
  Synthetic: FXN 5 reverse 9:69036483-69036507; SpCas9
ctagctattctgcagctctga

SEQ ID NO: 51026 - DNA, 20 bp, Artificial Sequence
  Synthetic: FXN 5 reverse 9:69036484-69036507; SpCas9
tagctattctgcagctctga

SEQ ID NO: 51027 - DNA, 19 bp, Artificial Sequence
  Synthetic: FXN 5 reverse 9:69036485-69036507; SpCas9
agctattctgcagctctga

SEQ ID NO: 51028 - DNA, 18 bp, Artificial Sequence
  Synthetic: FXN 5 reverse 9:69036486-69036507; SpCas9
gctattctgcagctctga

SEQ ID NO: 51029 - DNA, 25 bp, Artificial Sequence
  Synthetic: FXN 5 forward 9:69036480-69036508; SpCas9
tttcagagctgcagaatagctagag

SEQ ID NO: 51030 - DNA, 24 bp, Artificial Sequence
  Synthetic: FXN 5 forward 9:69036481-69036508; SpCas9
ttcagagctgcagaatagctagag

SEQ ID NO: 51031 - DNA, 23 bp, Artificial Sequence
  Synthetic: FXN 5 forward 9:69036482-69036508; SpCas9
tcagagctgcagaatagctagag

SEQ ID NO: 51032 - DNA, 22 bp, Artificial Sequence
  Synthetic: FXN 5 forward 9:69036483-69036508; SpCas9
cagagctgcagaatagctagag

SEQ ID NO: 51033 - DNA, 21 bp, Artificial Sequence
  Synthetic: FXN 5 forward 9:69036484-69036508; SpCas9
agagctgcagaatagctagag

SEQ ID NO: 51034 - DNA, 20 bp, Artificial Sequence
  Synthetic: FXN 5 forward 9:69036485-69036508; SpCas9
gagctgcagaatagctagag

SEQ ID NO: 51035 - DNA, 19 bp, Artificial Sequence
  Synthetic: FXN 5 forward 9:69036486-69036508; SpCas9
agctgcagaatagctagag

SEQ ID NO: 51036 - DNA, 18 bp, Artificial Sequence
  Synthetic: FXN 5 forward 9:69036487-69036508; SpCas9
gctgcagaatagctagag

SEQ ID NO: 51037 - DNA, 25 bp, Artificial Sequence
  Synthetic: FXN 5 forward 9:69036483-69036511; SpCas9
cagagctgcagaatagctagagcag

SEQ ID NO: 51038 - DNA, 24 bp, Artificial Sequence
  Synthetic: FXN 5 forward 9:69036484-69036511; SpCas9
agagctgcagaatagctagagcag

SEQ ID NO: 51039 - DNA, 23 bp, Artificial Sequence
  Synthetic: FXN 5 forward 9:69036485-69036511; SpCas9
gagctgcagaatagctagagcag

SEQ ID NO: 51040 - DNA, 22 bp, Artificial Sequence
  Synthetic: FXN 5 forward 9:69036486-69036511; SpCas9
agctgcagaatagctagagcag

SEQ ID NO: 51041 - DNA, 21 bp, Artificial Sequence
  Synthetic: FXN 5 forward 9:69036487-69036511; SpCas9
gctgcagaatagctagagcag

SEQ ID NO: 51042 - DNA, 20 bp, Artificial Sequence
  Synthetic: FXN 5 forward 9:69036488-69036511; SpCas9
ctgcagaatagctagagcag

SEQ ID NO: 51043 - DNA, 19 bp, Artificial Sequence
  Synthetic: FXN 5 forward 9:69036489-69036511; SpCas9
tgcagaatagctagagcag

SEQ ID NO: 51044 - DNA, 18 bp, Artificial Sequence
  Synthetic: FXN 5 forward 9:69036490-69036511; SpCas9
gcagaatagctagagcag

SEQ ID NO: 51045 - DNA, 25 bp, Artificial Sequence
  Synthetic: FXN 5 forward 9:69036484-69036512; SpCas9
agagctgcagaatagctagagcagc

SEQ ID NO: 51046 - DNA, 24 bp, Artificial Sequence
  Synthetic: FXN 5 forward 9:69036485-69036512; SpCas9
gagctgcagaatagctagagcagc

SEQ ID NO: 51047 - DNA, 23 bp, Artificial Sequence
  Synthetic: FXN 5 forward 9:69036486-69036512; SpCas9
agctgcagaatagctagagcagc

SEQ ID NO: 51048 - DNA, 22 bp, Artificial Sequence
  Synthetic: FXN 5 forward 9:69036487-69036512; SpCas9
gctgcagaatagctagagcagc

SEQ ID NO: 51049 - DNA, 21 bp, Artificial Sequence
  Synthetic: FXN 5 forward 9:69036488-69036512; SpCas9
ctgcagaatagctagagcagc

SEQ ID NO: 51050 - DNA, 20 bp, Artificial Sequence
  Synthetic: FXN 5 forward 9:69036489-69036512; SpCas9
tgcagaatagctagagcagc

SEQ ID NO: 51051 - DNA, 19 bp, Artificial Sequence
  Synthetic: FXN 5 forward 9:69036490-69036512; SpCas9
gcagaatagctagagcagc

SEQ ID NO: 51052 - DNA, 18 bp, Artificial Sequence
  Synthetic: FXN 5 forward 9:69036491-69036512; SpCas9
cagaatagctagagcagc

SEQ ID NO: 51053 - DNA, 25 bp, Artificial Sequence
  Synthetic: FXN 5 forward 9:69036485-69036513; SpCas9
gagctgcagaatagctagagcagca

SEQ ID NO: 51054 - DNA, 24 bp, Artificial Sequence
  Synthetic: FXN 5 forward 9:69036486-69036513; SpCas9
agctgcagaatagctagagcagca

SEQ ID NO: 51055 - DNA, 23 bp, Artificial Sequence
  Synthetic: FXN 5 forward 9:69036487-69036513; SpCas9
gctgcagaatagctagagcagca

SEQ ID NO: 51056 - DNA, 22 bp, Artificial Sequence
  Synthetic: FXN 5 forward 9:69036488-69036513; SpCas9
ctgcagaatagctagagcagca

SEQ ID NO: 51057 - DNA, 21 bp, Artificial Sequence
  Synthetic: FXN 5 forward 9:69036489-69036513; SpCas9
tgcagaatagctagagcagca

SEQ ID NO: 51058 - DNA, 20 bp, Artificial Sequence
  Synthetic: FXN 5 forward 9:69036490-69036513; SpCas9
gcagaatagctagagcagca

SEQ ID NO: 51059 - DNA, 19 bp, Artificial Sequence
  Synthetic: FXN 5 forward 9:69036491-69036513; SpCas9
cagaatagctagagcagca

SEQ ID NO: 51060 - DNA, 18 bp, Artificial Sequence
  Synthetic: FXN 5 forward 9:69036492-69036513; SpCas9
agaatagctagagcagca

SEQ ID NO: 51061 - DNA, 25 bp, Artificial Sequence
  Synthetic: FXN 5 forward 9:69036486-69036514; SpCas9
agctgcagaatagctagagcagcag

SEQ ID NO: 51062 - DNA, 24 bp, Artificial Sequence
  Synthetic: FXN 5 forward 9:69036487-69036514; SpCas9
gctgcagaatagctagagcagcag

SEQ ID NO: 51063 - DNA, 23 bp, Artificial Sequence
  Synthetic: FXN 5 forward 9:69036488-69036514; SpCas9
ctgcagaatagctagagcagcag

SEQ ID NO: 51064 - DNA, 22 bp, Artificial Sequence
  Synthetic: FXN 5 forward 9:69036489-69036514; SpCas9
tgcagaatagctagagcagcag

SEQ ID NO: 51065 - DNA, 21 bp, Artificial Sequence
  Synthetic: FXN 5 forward 9:69036490-69036514; SpCas9
gcagaatagctagagcagcag

SEQ ID NO: 51066 - DNA, 20 bp, Artificial Sequence
  Synthetic: FXN 5 forward 9:69036491-69036514; SpCas9
cagaatagctagagcagcag

SEQ ID NO: 51067 - DNA, 19 bp, Artificial Sequence
  Synthetic: FXN 5 forward 9:69036492-69036514; SpCas9
agaatagctagagcagcag

SEQ ID NO: 51068 - DNA, 18 bp, Artificial Sequence
  Synthetic: FXN 5 forward 9:69036493-69036514; SpCas9
gaatagctagagcagcag

SEQ ID NO: 51069 - DNA, 25 bp, Artificial Sequence
  Synthetic: FXN 5 reverse 9:69036488-69036516; SpCas9
ggcccctgctgctctagctattctg

SEQ ID NO: 51070 - DNA, 24 bp, Artificial Sequence
  Synthetic: FXN 5 reverse 9:69036489-69036516; SpCas9
gcccctgctgctctagctattctg

SEQ ID NO: 51071 - DNA, 23 bp, Artificial Sequence
  Synthetic: FXN 5 reverse 9:69036490-69036516; SpCas9
cccctgctgctctagctattctg

SEQ ID NO: 51072 - DNA, 22 bp, Artificial Sequence
  Synthetic: FXN 5 reverse 9:69036491-69036516; SpCas9
ccctgctgctctagctattctg

SEQ ID NO: 51073 - DNA, 21 bp, Artificial Sequence
  Synthetic: FXN 5 reverse 9:69036492-69036516; SpCas9
cctgctgctctagctattctg

SEQ ID NO: 51074 - DNA, 20 bp, Artificial Sequence
  Synthetic: FXN 5 reverse 9:69036493-69036516; SpCas9
ctgctgctctagctattctg

SEQ ID NO: 51075 - DNA, 19 bp, Artificial Sequence
  Synthetic: FXN 5 reverse 9:69036494-69036516; SpCas9
tgctgctctagctattctg

SEQ ID NO: 51076 - DNA, 18 bp, Artificial Sequence
  Synthetic: FXN 5 reverse 9:69036495-69036516; SpCas9
gctgctctagctattctg

SEQ ID NO: 51077 - DNA, 25 bp, Artificial Sequence
  Synthetic: FXN 5 forward 9:69036492-69036520; SpCas9
agaatagctagagcagcaggggccc

SEQ ID NO: 51078 - DNA, 24 bp, Artificial Sequence
  Synthetic: FXN 5 forward 9:69036493-69036520; SpCas9
gaatagctagagcagcaggggccc

SEQ ID NO: 51079 - DNA, 23 bp, Artificial Sequence
  Synthetic: FXN 5 forward 9:69036494-69036520; SpCas9
aatagctagagcagcaggggccc

SEQ ID NO: 51080 - DNA, 22 bp, Artificial Sequence
  Synthetic: FXN 5 forward 9:69036495-69036520; SpCas9
atagctagagcagcaggggccc

SEQ ID NO: 51081 - DNA, 21 bp, Artificial Sequence
  Synthetic: FXN 5 forward 9:69036496-69036520; SpCas9
tagctagagcagcaggggccc

SEQ ID NO: 51082 - DNA, 20 bp, Artificial Sequence
  Synthetic: FXN 5 forward 9:69036497-69036520; SpCas9
agctagagcagcaggggccc

SEQ ID NO: 51083 - DNA, 19 bp, Artificial Sequence
  Synthetic: FXN 5 forward 9:69036498-69036520; SpCas9
gctagagcagcaggggccc

SEQ ID NO: 51084 - DNA, 18 bp, Artificial Sequence
  Synthetic: FXN 5 forward 9:69036499-69036520; SpCas9
ctagagcagcaggggccc

SEQ ID NO: 51085 - DNA, 25 bp, Artificial Sequence
  Synthetic: FXN 5 forward 9:69036499-69036527; SpCas9
ctagagcagcaggggccctggcttt

SEQ ID NO: 51086 - DNA, 24 bp, Artificial Sequence
  Synthetic: FXN 5 forward 9:69036500-69036527; SpCas9
tagagcagcaggggccctggcttt

SEQ ID NO: 51087 - DNA, 23 bp, Artificial Sequence
  Synthetic: FXN 5 forward 9:69036501-69036527; SpCas9
agagcagcaggggccctggcttt

SEQ ID NO: 51088 - DNA, 22 bp, Artificial Sequence
  Synthetic: FXN 5 forward 9:69036502-69036527; SpCas9
gagcagcaggggccctggcttt

SEQ ID NO: 51089 - DNA, 21 bp, Artificial Sequence
  Synthetic: FXN 5 forward 9:69036503-69036527; SpCas9
agcagcaggggccctggcttt

SEQ ID NO: 51090 - DNA, 20 bp, Artificial Sequence
  Synthetic: FXN 5 forward 9:69036504-69036527; SpCas9
gcagcaggggccctggcttt

SEQ ID NO: 51091 - DNA, 19 bp, Artificial Sequence
  Synthetic: FXN 5 forward 9:69036505-69036527; SpCas9
cagcaggggccctggcttt

SEQ ID NO: 51092 - DNA, 18 bp, Artificial Sequence
  Synthetic: FXN 5 forward 9:69036506-69036527; SpCas9
agcaggggccctggcttt

SEQ ID NO: 51093 - DNA, 25 bp, Artificial Sequence
  Synthetic: FXN 5 reverse 9:69036499-69036527; SpCas9
ccaaaagccagggcccctgctgctc

SEQ ID NO: 51094 - DNA, 24 bp, Artificial Sequence
  Synthetic: FXN 5 reverse 9:69036500-69036527; SpCas9
caaaagccagggcccctgctgctc

SEQ ID NO: 51095 - DNA, 23 bp, Artificial Sequence
  Synthetic: FXN 5 reverse 9:69036501-69036527; SpCas9
aaaagccagggcccctgctgctc

SEQ ID NO: 51096 - DNA, 22 bp, Artificial Sequence
  Synthetic: FXN 5 reverse 9:69036502-69036527; SpCas9
aaagccagggcccctgctgctc

SEQ ID NO: 51097 - DNA, 21 bp, Artificial Sequence
  Synthetic: FXN 5 reverse 9:69036503-69036527; SpCas9
aagccagggcccctgctgctc

SEQ ID NO: 51098 - DNA, 20 bp, Artificial Sequence
  Synthetic: FXN 5 reverse 9:69036504-69036527; SpCas9
agccagggcccctgctgctc

SEQ ID NO: 51099 - DNA, 19 bp, Artificial Sequence
  Synthetic: FXN 5 reverse 9:69036505-69036527; SpCas9
gccagggcccctgctgctc

SEQ ID NO: 51100 - DNA, 18 bp, Artificial Sequence
  Synthetic: FXN 5 reverse 9:69036506-69036527; SpCas9
ccagggcccctgctgctc

SEQ ID NO: 51101 - DNA, 25 bp, Artificial Sequence
  Synthetic: FXN 5 reverse 9:69036514-69036542; SpCas9
aggtcgggtcagtttccaaaagcca

SEQ ID NO: 51102 - DNA, 24 bp, Artificial Sequence
  Synthetic: FXN 5 reverse 9:69036515-69036542; SpCas9
ggtcgggtcagtttccaaaagcca

SEQ ID NO: 51103 - DNA, 23 bp, Artificial Sequence
  Synthetic: FXN 5 reverse 9:69036516-69036542; SpCas9
gtcgggtcagtttccaaaagcca

SEQ ID NO: 51104 - DNA, 22 bp, Artificial Sequence
  Synthetic: FXN 5 reverse 9:69036517-69036542; SpCas9
tcgggtcagtttccaaaagcca

SEQ ID NO: 51105 - DNA, 21 bp, Artificial Sequence
  Synthetic: FXN 5 reverse 9:69036518-69036542; SpCas9
cgggtcagtttccaaaagcca

SEQ ID NO: 51106 - DNA, 20 bp, Artificial Sequence
  Synthetic: FXN 5 reverse 9:69036519-69036542; SpCas9
gggtcagtttccaaaagcca

SEQ ID NO: 51107 - DNA, 19 bp, Artificial Sequence
  Synthetic: FXN 5 reverse 9:69036520-69036542; SpCas9
ggtcagtttccaaaagcca

SEQ ID NO: 51108 - DNA, 18 bp, Artificial Sequence
  Synthetic: FXN 5 reverse 9:69036521-69036542; SpCas9
gtcagtttccaaaagcca

SEQ ID NO: 51109 - DNA, 25 bp, Artificial Sequence
  Synthetic: FXN 5 reverse 9:69036515-69036543; SpCas9
aaggtcgggtcagtttccaaaagcc

SEQ ID NO: 51110 - DNA, 24 bp, Artificial Sequence
  Synthetic: FXN 5 reverse 9:69036516-69036543; SpCas9
aggtcgggtcagtttccaaaagcc

SEQ ID NO: 51111 - DNA, 23 bp, Artificial Sequence
  Synthetic: FXN 5 reverse 9:69036517-69036543; SpCas9
ggtcgggtcagtttccaaaagcc

SEQ ID NO: 51112 - DNA, 22 bp, Artificial Sequence
  Synthetic: FXN 5 reverse 9:69036518-69036543; SpCas9
gtcgggtcagtttccaaaagcc

SEQ ID NO: 51113 - DNA, 21 bp, Artificial Sequence
  Synthetic: FXN 5 reverse 9:69036519-69036543; SpCas9
tcgggtcagtttccaaaagcc

SEQ ID NO: 51114 - DNA, 20 bp, Artificial Sequence
  Synthetic: FXN 5 reverse 9:69036520-69036543; SpCas9
cgggtcagtttccaaaagcc

SEQ ID NO: 51115 - DNA, 19 bp, Artificial Sequence
  Synthetic: FXN 5 reverse 9:69036521-69036543; SpCas9
gggtcagtttccaaaagcc

SEQ ID NO: 51116 - DNA, 18 bp, Artificial Sequence
  Synthetic: FXN 5 reverse 9:69036522-69036543; SpCas9
ggtcagtttccaaaagcc

SEQ ID NO: 51117 - DNA, 25 bp, Artificial Sequence
  Synthetic: FXN 5 reverse 9:69036516-69036544; SpCas9
aaaggtcgggtcagtttccaaaagc

SEQ ID NO: 51118 - DNA, 24 bp, Artificial Sequence
  Synthetic: FXN 5 reverse 9:69036517-69036544; SpCas9
aaggtcgggtcagtttccaaaagc

SEQ ID NO: 51119 - DNA, 23 bp, Artificial Sequence
  Synthetic: FXN 5 reverse 9:69036518-69036544; SpCas9
aggtcgggtcagtttccaaaagc

SEQ ID NO: 51120 - DNA, 22 bp, Artificial Sequence
  Synthetic: FXN 5 reverse 9:69036519-69036544; SpCas9
ggtcgggtcagtttccaaaagc

SEQ ID NO: 51121 - DNA, 21 bp, Artificial Sequence
  Synthetic: FXN 5 reverse 9:69036520-69036544; SpCas9
gtcgggtcagtttccaaaagc

SEQ ID NO: 51122 - DNA, 20 bp, Artificial Sequence
  Synthetic: FXN 5 reverse 9:69036521-69036544; SpCas9
tcgggtcagtttccaaaagc

SEQ ID NO: 51123 - DNA, 19 bp, Artificial Sequence
  Synthetic: FXN 5 reverse 9:69036522-69036544; SpCas9
cgggtcagtttccaaaagc

SEQ ID NO: 51124 - DNA, 18 bp, Artificial Sequence
  Synthetic: FXN 5 reverse 9:69036523-69036544; SpCas9
gggtcagtttccaaaagc

SEQ ID NO: 51125 - DNA, 25 bp, Artificial Sequence
  Synthetic: FXN 5 reverse 9:69036520-69036548; SpCas9
gaataaaggtcgggtcagtttccaa

SEQ ID NO: 51126 - DNA, 24 bp, Artificial Sequence
  Synthetic: FXN 5 reverse 9:69036521-69036548; SpCas9
aataaaggtcgggtcagtttccaa

SEQ ID NO: 51127 - DNA, 23 bp, Artificial Sequence
  Synthetic: FXN 5 reverse 9:69036522-69036548; SpCas9
ataaaggtcgggtcagtttccaa

SEQ ID NO: 51128 - DNA, 22 bp, Artificial Sequence
  Synthetic: FXN 5 reverse 9:69036523-69036548; SpCas9
taaaggtcgggtcagtttccaa

SEQ ID NO: 51129 - DNA, 21 bp, Artificial Sequence
  Synthetic: FXN 5 reverse 9:69036524-69036548; SpCas9
aaaggtcgggtcagtttccaa

SEQ ID NO: 51130 - DNA, 20 bp, Artificial Sequence
  Synthetic: FXN 5 reverse 9:69036525-69036548; SpCas9
aaggtcgggtcagtttccaa

SEQ ID NO: 51131 - DNA, 19 bp, Artificial Sequence
  Synthetic: FXN 5 reverse 9:69036526-69036548; SpCas9
aggtcgggtcagtttccaa

SEQ ID NO: 51132 - DNA, 18 bp, Artificial Sequence
  Synthetic: FXN 5 reverse 9:69036527-69036548; SpCas9
ggtcgggtcagtttccaa

SEQ ID NO: 51133 - DNA, 25 bp, Artificial Sequence
  Synthetic: FXN 5 forward 9:69036523-69036551; SpCas9
ttggaaactgacccgacctttattc

SEQ ID NO: 51134 - DNA, 24 bp, Artificial Sequence
  Synthetic: FXN 5 forward 9:69036524-69036551; SpCas9
tggaaactgacccgacctttattc

SEQ ID NO: 51135 - DNA, 23 bp, Artificial Sequence
  Synthetic: FXN 5 forward 9:69036525-69036551; SpCas9
ggaaactgacccgacctttattc

SEQ ID NO: 51136 - DNA, 22 bp, Artificial Sequence
  Synthetic: FXN 5 forward 9:69036526-69036551; SpCas9
gaaactgacccgacctttattc

SEQ ID NO: 51137 - DNA, 21 bp, Artificial Sequence
  Synthetic: FXN 5 forward 9:69036527-69036551; SpCas9
aaactgacccgacctttattc

SEQ ID NO: 51138 - DNA, 20 bp, Artificial Sequence
  Synthetic: FXN 5 forward 9:69036528-69036551; SpCas9
aactgacccgacctttattc

SEQ ID NO: 51139 - DNA, 19 bp, Artificial Sequence
  Synthetic: FXN 5 forward 9:69036529-69036551; SpCas9
actgacccgacctttattc

SEQ ID NO: 51140 - DNA, 18 bp, Artificial Sequence
  Synthetic: FXN 5 forward 9:69036530-69036551; SpCas9
ctgacccgacctttattc

SEQ ID NO: 51141 - DNA, 25 bp, Artificial Sequence
  Synthetic: FXN 5 reverse 9:69036530-69036558; SpCas9
gcagaatctggaataaaggtcgggt

SEQ ID NO: 51142 - DNA, 24 bp, Artificial Sequence
  Synthetic: FXN 5 reverse 9:69036531-69036558; SpCas9
cagaatctggaataaaggtcgggt

SEQ ID NO: 51143 - DNA, 23 bp, Artificial Sequence
  Synthetic: FXN 5 reverse 9:69036532-69036558; SpCas9
agaatctggaataaaggtcgggt

SEQ ID NO: 51144 - DNA, 22 bp, Artificial Sequence
  Synthetic: FXN 5 reverse 9:69036533-69036558; SpCas9
gaatctggaataaaggtcgggt

SEQ ID NO: 51145 - DNA, 21 bp, Artificial Sequence
  Synthetic: FXN 5 reverse 9:69036534-69036558; SpCas9
aatctggaataaaggtcgggt

SEQ ID NO: 51146 - DNA, 20 bp, Artificial Sequence
  Synthetic: FXN 5 reverse 9:69036535-69036558; SpCas9
atctggaataaaggtcgggt

SEQ ID NO: 51147 - DNA, 19 bp, Artificial Sequence
  Synthetic: FXN 5 reverse 9:69036536-69036558; SpCas9
tctggaataaaggtcgggt

SEQ ID NO: 51148 - DNA, 18 bp, Artificial Sequence
  Synthetic: FXN 5 reverse 9:69036537-69036558; SpCas9
ctggaataaaggtcgggt

SEQ ID NO: 51149 - DNA, 25 bp, Artificial Sequence
  Synthetic: FXN 5 reverse 9:69036534-69036562; SpCas9
tggggcagaatctggaataaaggtc

SEQ ID NO: 51150 - DNA, 24 bp, Artificial Sequence
  Synthetic: FXN 5 reverse 9:69036535-69036562; SpCas9
ggggcagaatctggaataaaggtc

SEQ ID NO: 51151 - DNA, 23 bp, Artificial Sequence
  Synthetic: FXN 5 reverse 9:69036536-69036562; SpCas9
gggcagaatctggaataaaggtc

SEQ ID NO: 51152 - DNA, 22 bp, Artificial Sequence
  Synthetic: FXN 5 reverse 9:69036537-69036562; SpCas9
ggcagaatctggaataaaggtc

SEQ ID NO: 51153 - DNA, 21 bp, Artificial Sequence
  Synthetic: FXN 5 reverse 9:69036538-69036562; SpCas9
gcagaatctggaataaaggtc

SEQ ID NO: 51154 - DNA, 20 bp, Artificial Sequence
  Synthetic: FXN 5 reverse 9:69036539-69036562; SpCas9
cagaatctggaataaaggtc

SEQ ID NO: 51155 - DNA, 19 bp, Artificial Sequence
  Synthetic: FXN 5 reverse 9:69036540-69036562; SpCas9
agaatctggaataaaggtc

SEQ ID NO: 51156 - DNA, 18 bp, Artificial Sequence
  Synthetic: FXN 5 reverse 9:69036541-69036562; SpCas9
gaatctggaataaaggtc

SEQ ID NO: 51157 - DNA, 25 bp, Artificial Sequence
  Synthetic: FXN 5 reverse 9:69036535-69036563; SpCas9
gtggggcagaatctggaataaaggt

SEQ ID NO: 51158 - DNA, 24 bp, Artificial Sequence
  Synthetic: FXN 5 reverse 9:69036536-69036563; SpCas9
tggggcagaatctggaataaaggt

SEQ ID NO: 51159 - DNA, 23 bp, Artificial Sequence
  Synthetic: FXN 5 reverse 9:69036537-69036563; SpCas9
ggggcagaatctggaataaaggt

SEQ ID NO: 51160 - DNA, 22 bp, Artificial Sequence
  Synthetic: FXN 5 reverse 9:69036538-69036563; SpCas9
gggcagaatctggaataaaggt

SEQ ID NO: 51161 - DNA, 21 bp, Artificial Sequence
  Synthetic: FXN 5 reverse 9:69036539-69036563; SpCas9
ggcagaatctggaataaaggt

SEQ ID NO: 51162 - DNA, 20 bp, Artificial Sequence
  Synthetic: FXN 5 reverse 9:69036540-69036563; SpCas9
gcagaatctggaataaaggt

SEQ ID NO: 51163 - DNA, 19 bp, Artificial Sequence
  Synthetic: FXN 5 reverse 9:69036541-69036563; SpCas9
cagaatctggaataaaggt

SEQ ID NO: 51164 - DNA, 18 bp, Artificial Sequence
  Synthetic: FXN 5 reverse 9:69036542-69036563; SpCas9
agaatctggaataaaggt

SEQ ID NO: 51165 - DNA, 25 bp, Artificial Sequence
  Synthetic: FXN 5 reverse 9:69036539-69036567; SpCas9
cggagtggggcagaatctggaataa

SEQ ID NO: 51166 - DNA, 24 bp, Artificial Sequence
  Synthetic: FXN 5 reverse 9:69036540-69036567; SpCas9
ggagtggggcagaatctggaataa

SEQ ID NO: 51167 - DNA, 23 bp, Artificial Sequence
  Synthetic: FXN 5 reverse 9:69036541-69036567; SpCas9
gagtggggcagaatctggaataa

SEQ ID NO: 51168 - DNA, 22 bp, Artificial Sequence
  Synthetic: FXN 5 reverse 9:69036542-69036567; SpCas9
agtggggcagaatctggaataa

SEQ ID NO: 51169 - DNA, 21 bp, Artificial Sequence
  Synthetic: FXN 5 reverse 9:69036543-69036567; SpCas9
gtggggcagaatctggaataa

SEQ ID NO: 51170 - DNA, 20 bp, Artificial Sequence
  Synthetic: FXN 5 reverse 9:69036544-69036567; SpCas9
tggggcagaatctggaataa

SEQ ID NO: 51171 - DNA, 19 bp, Artificial Sequence
  Synthetic: FXN 5 reverse 9:69036545-69036567; SpCas9
ggggcagaatctggaataa

SEQ ID NO: 51172 - DNA, 18 bp, Artificial Sequence
  Synthetic: FXN 5 reverse 9:69036546-69036567; SpCas9
gggcagaatctggaataa

SEQ ID NO: 51173 - DNA, 25 bp, Artificial Sequence
  Synthetic: FXN 5 reverse 9:69036540-69036568; SpCas9
gcggagtggggcagaatctggaata

SEQ ID NO: 51174 - DNA, 24 bp, Artificial Sequence
  Synthetic: FXN 5 reverse 9:69036541-69036568; SpCas9
cggagtggggcagaatctggaata

SEQ ID NO: 51175 - DNA, 23 bp, Artificial Sequence
  Synthetic: FXN 5 reverse 9:69036542-69036568; SpCas9
ggagtggggcagaatctggaata

SEQ ID NO: 51176 - DNA, 22 bp, Artificial Sequence
  Synthetic: FXN 5 reverse 9:69036543-69036568; SpCas9
gagtggggcagaatctggaata

SEQ ID NO: 51177 - DNA, 21 bp, Artificial Sequence
  Synthetic: FXN 5 reverse 9:69036544-69036568; SpCas9
agtggggcagaatctggaata

SEQ ID NO: 51178 - DNA, 20 bp, Artificial Sequence
  Synthetic: FXN 5 reverse 9:69036545-69036568; SpCas9
gtggggcagaatctggaata

SEQ ID NO: 51179 - DNA, 19 bp, Artificial Sequence
  Synthetic: FXN 5 reverse 9:69036546-69036568; SpCas9
tggggcagaatctggaata

SEQ ID NO: 51180 - DNA, 18 bp, Artificial Sequence
  Synthetic: FXN 5 reverse 9:69036547-69036568; SpCas9
ggggcagaatctggaata

SEQ ID NO: 51181 - DNA, 25 bp, Artificial Sequence
  Synthetic: FXN 5 forward 9:69036542-69036570; SpCas9
ttattccagattctgccccactccg

SEQ ID NO: 51182 - DNA, 24 bp, Artificial Sequence
  Synthetic: FXN 5 forward 9:69036543-69036570; SpCas9
tattccagattctgccccactccg

SEQ ID NO: 51183 - DNA, 23 bp, Artificial Sequence
  Synthetic: FXN 5 forward 9:69036544-69036570; SpCas9
attccagattctgccccactccg

SEQ ID NO: 51184 - DNA, 22 bp, Artificial Sequence
  Synthetic: FXN 5 forward 9:69036545-69036570; SpCas9
ttccagattctgccccactccg

SEQ ID NO: 51185 - DNA, 21 bp, Artificial Sequence
  Synthetic: FXN 5 forward 9:69036546-69036570; SpCas9
tccagattctgccccactccg

SEQ ID NO: 51186 - DNA, 20 bp, Artificial Sequence
  Synthetic: FXN 5 forward 9:69036547-69036570; SpCas9
ccagattctgccccactccg

SEQ ID NO: 51187 - DNA, 19 bp, Artificial Sequence
  Synthetic: FXN 5 forward 9:69036548-69036570; SpCas9
cagattctgccccactccg

SEQ ID NO: 51188 - DNA, 18 bp, Artificial Sequence
  Synthetic: FXN 5 forward 9:69036549-69036570; SpCas9
agattctgccccactccg

SEQ ID NO: 51189 - DNA, 25 bp, Artificial Sequence
  Synthetic: FXN 5 forward 9:69036544-69036572; SpCas9
attccagattctgccccactccgca

SEQ ID NO: 51190 - DNA, 24 bp, Artificial Sequence
  Synthetic: FXN 5 forward 9:69036545-69036572; SpCas9
ttccagattctgccccactccgca

SEQ ID NO: 51191 - DNA, 23 bp, Artificial Sequence
  Synthetic: FXN 5 forward 9:69036546-69036572; SpCas9
tccagattctgccccactccgca

SEQ ID NO: 51192 - DNA, 22 bp, Artificial Sequence
  Synthetic: FXN 5 forward 9:69036547-69036572; SpCas9
ccagattctgccccactccgca

SEQ ID NO: 51193 - DNA, 21 bp, Artificial Sequence
  Synthetic: FXN 5 forward 9:69036548-69036572; SpCas9
cagattctgccccactccgca

SEQ ID NO: 51194 - DNA, 20 bp, Artificial Sequence
  Synthetic: FXN 5 forward 9:69036549-69036572; SpCas9
agattctgccccactccgca

SEQ ID NO: 51195 - DNA, 19 bp, Artificial Sequence
  Synthetic: FXN 5 forward 9:69036550-69036572; SpCas9
gattctgccccactccgca

SEQ ID NO: 51196 - DNA, 18 bp, Artificial Sequence
  Synthetic: FXN 5 forward 9:69036551-69036572; SpCas9
attctgccccactccgca

SEQ ID NO: 51197 - DNA, 25 bp, Artificial Sequence
  Synthetic: FXN 5 reverse 9:69036547-69036575; SpCas9
cagctctgcggagtggggcagaatc

SEQ ID NO: 51198 - DNA, 24 bp, Artificial Sequence
  Synthetic: FXN 5 reverse 9:69036548-69036575; SpCas9
agctctgcggagtggggcagaatc

SEQ ID NO: 51199 - DNA, 23 bp, Artificial Sequence
  Synthetic: FXN 5 reverse 9:69036549-69036575; SpCas9
gctctgcggagtggggcagaatc

SEQ ID NO: 51200 - DNA, 22 bp, Artificial Sequence
  Synthetic: FXN 5 reverse 9:69036550-69036575; SpCas9
ctctgcggagtggggcagaatc

SEQ ID NO: 51201 - DNA, 21 bp, Artificial Sequence
  Synthetic: FXN 5 reverse 9:69036551-69036575; SpCas9
tctgcggagtggggcagaatc

SEQ ID NO: 51202 - DNA, 20 bp, Artificial Sequence
  Synthetic: FXN 5 reverse 9:69036552-69036575; SpCas9
ctgcggagtggggcagaatc

SEQ ID NO: 51203 - DNA, 19 bp, Artificial Sequence
  Synthetic: FXN 5 reverse 9:69036553-69036575; SpCas9
tgcggagtggggcagaatc

SEQ ID NO: 51204 - DNA, 18 bp, Artificial Sequence
  Synthetic: FXN 5 reverse 9:69036554-69036575; SpCas9
gcggagtggggcagaatc

SEQ ID NO: 51205 - DNA, 25 bp, Artificial Sequence
  Synthetic: FXN 5 reverse 9:69036554-69036582; SpCas9
ggtcacacagctctgcggagtgggg

SEQ ID NO: 51206 - DNA, 24 bp, Artificial Sequence
  Synthetic: FXN 5 reverse 9:69036555-69036582; SpCas9
gtcacacagctctgcggagtgggg

SEQ ID NO: 51207 - DNA, 23 bp, Artificial Sequence
  Synthetic: FXN 5 reverse 9:69036556-69036582; SpCas9
tcacacagctctgcggagtgggg

SEQ ID NO: 51208 - DNA, 22 bp, Artificial Sequence
  Synthetic: FXN 5 reverse 9:69036557-69036582; SpCas9
cacacagctctgcggagtgggg

SEQ ID NO: 51209 - DNA, 21 bp, Artificial Sequence
  Synthetic: FXN 5 reverse 9:69036558-69036582; SpCas9
acacagctctgcggagtgggg

SEQ ID NO: 51210 - DNA, 20 bp, Artificial Sequence
  Synthetic: FXN 5 reverse 9:69036559-69036582; SpCas9
cacagctctgcggagtgggg

SEQ ID NO: 51211 - DNA, 19 bp, Artificial Sequence
  Synthetic: FXN 5 reverse 9:69036560-69036582; SpCas9
acagctctgcggagtgggg

SEQ ID NO: 51212 - DNA, 18 bp, Artificial Sequence
  Synthetic: FXN 5 reverse 9:69036561-69036582; SpCas9
cagctctgcggagtgggg

SEQ ID NO: 51213 - DNA, 25 bp, Artificial Sequence
  Synthetic: FXN 5 reverse 9:69036557-69036585; SpCas9
caaggtcacacagctctgcggagtg

SEQ ID NO: 51214 - DNA, 24 bp, Artificial Sequence
  Synthetic: FXN 5 reverse 9:69036558-69036585; SpCas9
aaggtcacacagctctgcggagtg

SEQ ID NO: 51215 - DNA, 23 bp, Artificial Sequence
  Synthetic: FXN 5 reverse 9:69036559-69036585; SpCas9
aggtcacacagctctgcggagtg

SEQ ID NO: 51216 - DNA, 22 bp, Artificial Sequence
  Synthetic: FXN 5 reverse 9:69036560-69036585; SpCas9
ggtcacacagctctgcggagtg

SEQ ID NO: 51217 - DNA, 21 bp, Artificial Sequence
  Synthetic: FXN 5 reverse 9:69036561-69036585; SpCas9
gtcacacagctctgcggagtg

SEQ ID NO: 51218 - DNA, 20 bp, Artificial Sequence
  Synthetic: FXN 5 reverse 9:69036562-69036585; SpCas9
tcacacagctctgcggagtg

SEQ ID NO: 51219 - DNA, 19 bp, Artificial Sequence
  Synthetic: FXN 5 reverse 9:69036563-69036585; SpCas9
cacacagctctgcggagtg

SEQ ID NO: 51220 - DNA, 18 bp, Artificial Sequence
  Synthetic: FXN 5 reverse 9:69036564-69036585; SpCas9
acacagctctgcggagtg

SEQ ID NO: 51221 - DNA, 25 bp, Artificial Sequence
  Synthetic: FXN 5 forward 9:69036558-69036586; SpCas9
cccactccgcagagctgtgtgacct

SEQ ID NO: 51222 - DNA, 24 bp, Artificial Sequence
  Synthetic: FXN 5 forward 9:69036559-69036586; SpCas9
ccactccgcagagctgtgtgacct

SEQ ID NO: 51223 - DNA, 23 bp, Artificial Sequence
  Synthetic: FXN 5 forward 9:69036560-69036586; SpCas9
cactccgcagagctgtgtgacct

SEQ ID NO: 51224 - DNA, 22 bp, Artificial Sequence
  Synthetic: FXN 5 forward 9:69036561-69036586; SpCas9
actccgcagagctgtgtgacct

SEQ ID NO: 51225 - DNA, 21 bp, Artificial Sequence
  Synthetic: FXN 5 forward 9:69036562-69036586; SpCas9
ctccgcagagctgtgtgacct

SEQ ID NO: 51226 - DNA, 20 bp, Artificial Sequence
  Synthetic: FXN 5 forward 9:69036563-69036586; SpCas9
tccgcagagctgtgtgacct

SEQ ID NO: 51227 - DNA, 19 bp, Artificial Sequence
  Synthetic: FXN 5 forward 9:69036564-69036586; SpCas9
ccgcagagctgtgtgacct

SEQ ID NO: 51228 - DNA, 18 bp, Artificial Sequence
  Synthetic: FXN 5 forward 9:69036565-69036586; SpCas9
cgcagagctgtgtgacct

SEQ ID NO: 51229 - DNA, 25 bp, Artificial Sequence
  Synthetic: FXN 5 reverse 9:69036558-69036586; SpCas9
ccaaggtcacacagctctgcggagt

SEQ ID NO: 51230 - DNA, 24 bp, Artificial Sequence
  Synthetic: FXN 5 reverse 9:69036559-69036586; SpCas9
caaggtcacacagctctgcggagt

SEQ ID NO: 51231 - DNA, 23 bp, Artificial Sequence
  Synthetic: FXN 5 reverse 9:69036560-69036586; SpCas9
aaggtcacacagctctgcggagt

SEQ ID NO: 51232 - DNA, 22 bp, Artificial Sequence
  Synthetic: FXN 5 reverse 9:69036561-69036586; SpCas9
aggtcacacagctctgcggagt

SEQ ID NO: 51233 - DNA, 21 bp, Artificial Sequence
  Synthetic: FXN 5 reverse 9:69036562-69036586; SpCas9
ggtcacacagctctgcggagt

SEQ ID NO: 51234 - DNA, 20 bp, Artificial Sequence
  Synthetic: FXN 5 reverse 9:69036563-69036586; SpCas9
gtcacacagctctgcggagt

SEQ ID NO: 51235 - DNA, 19 bp, Artificial Sequence
  Synthetic: FXN 5 reverse 9:69036564-69036586; SpCas9
tcacacagctctgcggagt

SEQ ID NO: 51236 - DNA, 18 bp, Artificial Sequence
  Synthetic: FXN 5 reverse 9:69036565-69036586; SpCas9
cacacagctctgcggagt

SEQ ID NO: 51237 - DNA, 25 bp, Artificial Sequence
  Synthetic: FXN 5 forward 9:69036559-69036587; SpCas9
ccactccgcagagctgtgtgacctt

SEQ ID NO: 51238 - DNA, 24 bp, Artificial Sequence
  Synthetic: FXN 5 forward 9:69036560-69036587; SpCas9
cactccgcagagctgtgtgacctt

SEQ ID NO: 51239 - DNA, 23 bp, Artificial Sequence
  Synthetic: FXN 5 forward 9:69036561-69036587; SpCas9
actccgcagagctgtgtgacctt

SEQ ID NO: 51240 - DNA, 22 bp, Artificial Sequence
  Synthetic: FXN 5 forward 9:69036562-69036587; SpCas9
ctccgcagagctgtgtgacctt

SEQ ID NO: 51241 - DNA, 21 bp, Artificial Sequence
  Synthetic: FXN 5 forward 9:69036563-69036587; SpCas9
tccgcagagctgtgtgacctt

SEQ ID NO: 51242 - DNA, 20 bp, Artificial Sequence
  Synthetic: FXN 5 forward 9:69036564-69036587; SpCas9
ccgcagagctgtgtgacctt

SEQ ID NO: 51243 - DNA, 19 bp, Artificial Sequence
  Synthetic: FXN 5 forward 9:69036565-69036587; SpCas9
cgcagagctgtgtgacctt

SEQ ID NO: 51244 - DNA, 18 bp, Artificial Sequence
  Synthetic: FXN 5 forward 9:69036566-69036587; SpCas9
gcagagctgtgtgacctt

SEQ ID NO: 51245 - DNA, 25 bp, Artificial Sequence
  Synthetic: FXN 5 reverse 9:69036559-69036587; SpCas9
cccaaggtcacacagctctgcggag

SEQ ID NO: 51246 - DNA, 24 bp, Artificial Sequence
  Synthetic: FXN 5 reverse 9:69036560-69036587; SpCas9
ccaaggtcacacagctctgcggag

SEQ ID NO: 51247 - DNA, 23 bp, Artificial Sequence
  Synthetic: FXN 5 reverse 9:69036561-69036587; SpCas9
caaggtcacacagctctgcggag

SEQ ID NO: 51248 - DNA, 22 bp, Artificial Sequence
  Synthetic: FXN 5 reverse 9:69036562-69036587; SpCas9
aaggtcacacagctctgcggag

SEQ ID NO: 51249 - DNA, 21 bp, Artificial Sequence
  Synthetic: FXN 5 reverse 9:69036563-69036587; SpCas9
aggtcacacagctctgcggag

SEQ ID NO: 51250 - DNA, 20 bp, Artificial Sequence
  Synthetic: FXN 5 reverse 9:69036564-69036587; SpCas9
ggtcacacagctctgcggag

SEQ ID NO: 51251 - DNA, 19 bp, Artificial Sequence
  Synthetic: FXN 5 reverse 9:69036565-69036587; SpCas9
gtcacacagctctgcggag

SEQ ID NO: 51252 - DNA, 18 bp, Artificial Sequence
  Synthetic: FXN 5 reverse 9:69036566-69036587; SpCas9
tcacacagctctgcggag

SEQ ID NO: 51253 - DNA, 25 bp, Artificial Sequence
  Synthetic: FXN 5 forward 9:69036560-69036588; SpCas9
cactccgcagagctgtgtgaccttg

SEQ ID NO: 51254 - DNA, 24 bp, Artificial Sequence
  Synthetic: FXN 5 forward 9:69036561-69036588; SpCas9
actccgcagagctgtgtgaccttg

SEQ ID NO: 51255 - DNA, 23 bp, Artificial Sequence
  Synthetic: FXN 5 forward 9:69036562-69036588; SpCas9
ctccgcagagctgtgtgaccttg

SEQ ID NO: 51256 - DNA, 22 bp, Artificial Sequence
  Synthetic: FXN 5 forward 9:69036563-69036588; SpCas9
tccgcagagctgtgtgaccttg

SEQ ID NO: 51257 - DNA, 21 bp, Artificial Sequence
  Synthetic: FXN 5 forward 9:69036564-69036588; SpCas9
ccgcagagctgtgtgaccttg

SEQ ID NO: 51258 - DNA, 20 bp, Artificial Sequence
  Synthetic: FXN 5 forward 9:69036565-69036588; SpCas9
cgcagagctgtgtgaccttg

SEQ ID NO: 51259 - DNA, 19 bp, Artificial Sequence
  Synthetic: FXN 5 forward 9:69036566-69036588; SpCas9
gcagagctgtgtgaccttg

SEQ ID NO: 51260 - DNA, 18 bp, Artificial Sequence
  Synthetic: FXN 5 forward 9:69036567-69036588; SpCas9
cagagctgtgtgaccttg

SEQ ID NO: 51261 - DNA, 25 bp, Artificial Sequence
  Synthetic: FXN 5 forward 9:69036561-69036589; SpCas9
actccgcagagctgtgtgaccttgg

SEQ ID NO: 51262 - DNA, 24 bp, Artificial Sequence
  Synthetic: FXN 5 forward 9:69036562-69036589; SpCas9
ctccgcagagctgtgtgaccttgg

SEQ ID NO: 51263 - DNA, 23 bp, Artificial Sequence
  Synthetic: FXN 5 forward 9:69036563-69036589; SpCas9
tccgcagagctgtgtgaccttgg

SEQ ID NO: 51264 - DNA, 22 bp, Artificial Sequence
  Synthetic: FXN 5 forward 9:69036564-69036589; SpCas9
ccgcagagctgtgtgaccttgg

SEQ ID NO: 51265 - DNA, 21 bp, Artificial Sequence
  Synthetic: FXN 5 forward 9:69036565-69036589; SpCas9
cgcagagctgtgtgaccttgg

SEQ ID NO: 51266 - DNA, 20 bp, Artificial Sequence
  Synthetic: FXN 5 forward 9:69036566-69036589; SpCas9
gcagagctgtgtgaccttgg

SEQ ID NO: 51267 - DNA, 19 bp, Artificial Sequence
  Synthetic: FXN 5 forward 9:69036567-69036589; SpCas9
cagagctgtgtgaccttgg

SEQ ID NO: 51268 - DNA, 18 bp, Artificial Sequence
  Synthetic: FXN 5 forward 9:69036568-69036589; SpCas9
agagctgtgtgaccttgg

SEQ ID NO: 51269 - DNA, 25 bp, Artificial Sequence
  Synthetic: FXN 5 reverse 9:69036562-69036590; SpCas9
tcccccaaggtcacacagctctgcg

SEQ ID NO: 51270 - DNA, 24 bp, Artificial Sequence
  Synthetic: FXN 5 reverse 9:69036563-69036590; SpCas9
cccccaaggtcacacagctctgcg

SEQ ID NO: 51271 - DNA, 23 bp, Artificial Sequence
  Synthetic: FXN 5 reverse 9:69036564-69036590; SpCas9
ccccaaggtcacacagctctgcg

SEQ ID NO: 51272 - DNA, 22 bp, Artificial Sequence
  Synthetic: FXN 5 reverse 9:69036565-69036590; SpCas9
cccaaggtcacacagctctgcg

SEQ ID NO: 51273 - DNA, 21 bp, Artificial Sequence
  Synthetic: FXN 5 reverse 9:69036566-69036590; SpCas9
ccaaggtcacacagctctgcg

SEQ ID NO: 51274 - DNA, 20 bp, Artificial Sequence
  Synthetic: FXN 5 reverse 9:69036567-69036590; SpCas9
caaggtcacacagctctgcg

SEQ ID NO: 51275 - DNA, 19 bp, Artificial Sequence
  Synthetic: FXN 5 reverse 9:69036568-69036590; SpCas9
aaggtcacacagctctgcg

SEQ ID NO: 51276 - DNA, 18 bp, Artificial Sequence
  Synthetic: FXN 5 reverse 9:69036569-69036590; SpCas9
aggtcacacagctctgcg

SEQ ID NO: 51277 - DNA, 25 bp, Artificial Sequence
  Synthetic: FXN 5 reverse 9:69036564-69036592; SpCas9
aatcccccaaggtcacacagctctg

SEQ ID NO: 51278 - DNA, 24 bp, Artificial Sequence
  Synthetic: FXN 5 reverse 9:69036565-69036592; SpCas9
atcccccaaggtcacacagctctg

SEQ ID NO: 51279 - DNA, 23 bp, Artificial Sequence
  Synthetic: FXN 5 reverse 9:69036566-69036592; SpCas9
tcccccaaggtcacacagctctg

SEQ ID NO: 51280 - DNA, 22 bp, Artificial Sequence
  Synthetic: FXN 5 reverse 9:69036567-69036592; SpCas9
cccccaaggtcacacagctctg

SEQ ID NO: 51281 - DNA, 21 bp, Artificial Sequence
  Synthetic: FXN 5 reverse 9:69036568-69036592; SpCas9
ccccaaggtcacacagctctg

SEQ ID NO: 51282 - DNA, 20 bp, Artificial Sequence
  Synthetic: FXN 5 reverse 9:69036569-69036592; SpCas9
cccaaggtcacacagctctg

SEQ ID NO: 51283 - DNA, 19 bp, Artificial Sequence
  Synthetic: FXN 5 reverse 9:69036570-69036592; SpCas9
ccaaggtcacacagctctg

SEQ ID NO: 51284 - DNA, 18 bp, Artificial Sequence
  Synthetic: FXN 5 reverse 9:69036571-69036592; SpCas9
caaggtcacacagctctg

SEQ ID NO: 51285 - DNA, 25 bp, Artificial Sequence
  Synthetic: FXN 5 reverse 9:69036572-69036600; SpCas9
gttaggggaatcccccaaggtcaca

SEQ ID NO: 51286 - DNA, 24 bp, Artificial Sequence
  Synthetic: FXN 5 reverse 9:69036573-69036600; SpCas9
ttaggggaatcccccaaggtcaca

SEQ ID NO: 51287 - DNA, 23 bp, Artificial Sequence
  Synthetic: FXN 5 reverse 9:69036574-69036600; SpCas9
taggggaatcccccaaggtcaca

SEQ ID NO: 51288 - DNA, 22 bp, Artificial Sequence
  Synthetic: FXN 5 reverse 9:69036575-69036600; SpCas9
aggggaatcccccaaggtcaca

SEQ ID NO: 51289 - DNA, 21 bp, Artificial Sequence
  Synthetic: FXN 5 reverse 9:69036576-69036600; SpCas9
ggggaatcccccaaggtcaca

SEQ ID NO: 51290 - DNA, 20 bp, Artificial Sequence
  Synthetic: FXN 5 reverse 9:69036577-69036600; SpCas9
gggaatcccccaaggtcaca

SEQ ID NO: 51291 - DNA, 19 bp, Artificial Sequence
  Synthetic: FXN 5 reverse 9:69036578-69036600; SpCas9
ggaatcccccaaggtcaca

SEQ ID NO: 51292 - DNA, 18 bp, Artificial Sequence
  Synthetic: FXN 5 reverse 9:69036579-69036600; SpCas9
gaatcccccaaggtcaca

SEQ ID NO: 51293 - DNA, 25 bp, Artificial Sequence
  Synthetic: FXN 5 reverse 9:69036580-69036608; SpCas9
tcagagaggttaggggaatccccca

SEQ ID NO: 51294 - DNA, 24 bp, Artificial Sequence
  Synthetic: FXN 5 reverse 9:69036581-69036608; SpCas9
cagagaggttaggggaatccccca

SEQ ID NO: 51295 - DNA, 23 bp, Artificial Sequence
  Synthetic: FXN 5 reverse 9:69036582-69036608; SpCas9
agagaggttaggggaatccccca

SEQ ID NO: 51296 - DNA, 22 bp, Artificial Sequence
  Synthetic: FXN 5 reverse 9:69036583-69036608; SpCas9
gagaggttaggggaatccccca

SEQ ID NO: 51297 - DNA, 21 bp, Artificial Sequence
  Synthetic: FXN 5 reverse 9:69036584-69036608; SpCas9
agaggttaggggaatccccca

SEQ ID NO: 51298 - DNA, 20 bp, Artificial Sequence
  Synthetic: FXN 5 reverse 9:69036585-69036608; SpCas9
gaggttaggggaatccccca

SEQ ID NO: 51299 - DNA, 19 bp, Artificial Sequence
  Synthetic: FXN 5 reverse 9:69036586-69036608; SpCas9
aggttaggggaatccccca

SEQ ID NO: 51300 - DNA, 18 bp, Artificial Sequence
  Synthetic: FXN 5 reverse 9:69036587-69036608; SpCas9
ggttaggggaatccccca

SEQ ID NO: 51301 - DNA, 25 bp, Artificial Sequence
  Synthetic: FXN 5 forward 9:69036581-69036609; SpCas9
cttgggggattcccctaacctctct

SEQ ID NO: 51302 - DNA, 24 bp, Artificial Sequence
  Synthetic: FXN 5 forward 9:69036582-69036609; SpCas9
ttgggggattcccctaacctctct

SEQ ID NO: 51303 - DNA, 23 bp, Artificial Sequence
  Synthetic: FXN 5 forward 9:69036583-69036609; SpCas9
tgggggattcccctaacctctct

SEQ ID NO: 51304 - DNA, 22 bp, Artificial Sequence
  Synthetic: FXN 5 forward 9:69036584-69036609; SpCas9
gggggattcccctaacctctct

SEQ ID NO: 51305 - DNA, 21 bp, Artificial Sequence
  Synthetic: FXN 5 forward 9:69036585-69036609; SpCas9
ggggattcccctaacctctct

SEQ ID NO: 51306 - DNA, 20 bp, Artificial Sequence
  Synthetic: FXN 5 forward 9:69036586-69036609; SpCas9
gggattcccctaacctctct

SEQ ID NO: 51307 - DNA, 19 bp, Artificial Sequence
  Synthetic: FXN 5 forward 9:69036587-69036609; SpCas9
ggattcccctaacctctct

SEQ ID NO: 51308 - DNA, 18 bp, Artificial Sequence
  Synthetic: FXN 5 forward 9:69036588-69036609; SpCas9
gattcccctaacctctct

SEQ ID NO: 51309 - DNA, 25 bp, Artificial Sequence
  Synthetic: FXN 5 reverse 9:69036581-69036609; SpCas9
ctcagagaggttaggggaatccccc

SEQ ID NO: 51310 - DNA, 24 bp, Artificial Sequence
  Synthetic: FXN 5 reverse 9:69036582-69036609; SpCas9
tcagagaggttaggggaatccccc

SEQ ID NO: 51311 - DNA, 23 bp, Artificial Sequence
  Synthetic: FXN 5 reverse 9:69036583-69036609; SpCas9
cagagaggttaggggaatccccc

SEQ ID NO: 51312 - DNA, 22 bp, Artificial Sequence
  Synthetic: FXN 5 reverse 9:69036584-69036609; SpCas9
agagaggttaggggaatccccc

SEQ ID NO: 51313 - DNA, 21 bp, Artificial Sequence
  Synthetic: FXN 5 reverse 9:69036585-69036609; SpCas9
gagaggttaggggaatccccc

SEQ ID NO: 51314 - DNA, 20 bp, Artificial Sequence
  Synthetic: FXN 5 reverse 9:69036586-69036609; SpCas9
agaggttaggggaatccccc

SEQ ID NO: 51315 - DNA, 19 bp, Artificial Sequence
  Synthetic: FXN 5 reverse 9:69036587-69036609; SpCas9
gaggttaggggaatccccc

SEQ ID NO: 51316 - DNA, 18 bp, Artificial Sequence
  Synthetic: FXN 5 reverse 9:69036588-69036609; SpCas9
aggttaggggaatccccc

SEQ ID NO: 51317 - DNA, 25 bp, Artificial Sequence
  Synthetic: FXN 5 forward 9:69036587-69036615; SpCas9
ggattcccctaacctctctgagacg

SEQ ID NO: 51318 - DNA, 24 bp, Artificial Sequence
  Synthetic: FXN 5 forward 9:69036588-69036615; SpCas9
gattcccctaacctctctgagacg

SEQ ID NO: 51319 - DNA, 23 bp, Artificial Sequence
  Synthetic: FXN 5 forward 9:69036589-69036615; SpCas9
attcccctaacctctctgagacg

SEQ ID NO: 51320 - DNA, 22 bp, Artificial Sequence
  Synthetic: FXN 5 forward 9:69036590-69036615; SpCas9
ttcccctaacctctctgagacg

SEQ ID NO: 51321 - DNA, 21 bp, Artificial Sequence
  Synthetic: FXN 5 forward 9:69036591-69036615; SpCas9
tcccctaacctctctgagacg

SEQ ID NO: 51322 - DNA, 20 bp, Artificial Sequence
  Synthetic: FXN 5 forward 9:69036592-69036615; SpCas9
cccctaacctctctgagacg

SEQ ID NO: 51323 - DNA, 19 bp, Artificial Sequence
  Synthetic: FXN 5 forward 9:69036593-69036615; SpCas9
ccctaacctctctgagacg

SEQ ID NO: 51324 - DNA, 18 bp, Artificial Sequence
  Synthetic: FXN 5 forward 9:69036594-69036615; SpCas9
cctaacctctctgagacg

SEQ ID NO: 51325 - DNA, 25 bp, Artificial Sequence
  Synthetic: FXN 5 reverse 9:69036592-69036620; SpCas9
caaagccacgtctcagagaggttag

SEQ ID NO: 51326 - DNA, 24 bp, Artificial Sequence
  Synthetic: FXN 5 reverse 9:69036593-69036620; SpCas9
aaagccacgtctcagagaggttag

SEQ ID NO: 51327 - DNA, 23 bp, Artificial Sequence
  Synthetic: FXN 5 reverse 9:69036594-69036620; SpCas9
aagccacgtctcagagaggttag

SEQ ID NO: 51328 - DNA, 22 bp, Artificial Sequence
  Synthetic: FXN 5 reverse 9:69036595-69036620; SpCas9
agccacgtctcagagaggttag

SEQ ID NO: 51329 - DNA, 21 bp, Artificial Sequence
  Synthetic: FXN 5 reverse 9:69036596-69036620; SpCas9
gccacgtctcagagaggttag

SEQ ID NO: 51330 - DNA, 20 bp, Artificial Sequence
  Synthetic: FXN 5 reverse 9:69036597-69036620; SpCas9
ccacgtctcagagaggttag

SEQ ID NO: 51331 - DNA, 19 bp, Artificial Sequence
  Synthetic: FXN 5 reverse 9:69036598-69036620; SpCas9
cacgtctcagagaggttag

SEQ ID NO: 51332 - DNA, 18 bp, Artificial Sequence
  Synthetic: FXN 5 reverse 9:69036599-69036620; SpCas9
acgtctcagagaggttag

SEQ ID NO: 51333 - DNA, 25 bp, Artificial Sequence
  Synthetic: FXN 5 reverse 9:69036593-69036621; SpCas9
acaaagccacgtctcagagaggtta

SEQ ID NO: 51334 - DNA, 24 bp, Artificial Sequence
  Synthetic: FXN 5 reverse 9:69036594-69036621; SpCas9
caaagccacgtctcagagaggtta

SEQ ID NO: 51335 - DNA, 23 bp, Artificial Sequence
  Synthetic: FXN 5 reverse 9:69036595-69036621; SpCas9
aaagccacgtctcagagaggtta

SEQ ID NO: 51336 - DNA, 22 bp, Artificial Sequence
  Synthetic: FXN 5 reverse 9:69036596-69036621; SpCas9
aagccacgtctcagagaggtta

SEQ ID NO: 51337 - DNA, 21 bp, Artificial Sequence
  Synthetic: FXN 5 reverse 9:69036597-69036621; SpCas9
agccacgtctcagagaggtta

SEQ ID NO: 51338 - DNA, 20 bp, Artificial Sequence
  Synthetic: FXN 5 reverse 9:69036598-69036621; SpCas9
gccacgtctcagagaggtta

SEQ ID NO: 51339 - DNA, 19 bp, Artificial Sequence
  Synthetic: FXN 5 reverse 9:69036599-69036621; SpCas9
ccacgtctcagagaggtta

SEQ ID NO: 51340 - DNA, 18 bp, Artificial Sequence
  Synthetic: FXN 5 reverse 9:69036600-69036621; SpCas9
cacgtctcagagaggtta

SEQ ID NO: 51341 - DNA, 25 bp, Artificial Sequence
  Synthetic: FXN 5 reverse 9:69036594-69036622; SpCas9
aacaaagccacgtctcagagaggtt

SEQ ID NO: 51342 - DNA, 24 bp, Artificial Sequence
  Synthetic: FXN 5 reverse 9:69036595-69036622; SpCas9
acaaagccacgtctcagagaggtt

SEQ ID NO: 51343 - DNA, 23 bp, Artificial Sequence
  Synthetic: FXN 5 reverse 9:69036596-69036622; SpCas9
caaagccacgtctcagagaggtt

SEQ ID NO: 51344 - DNA, 22 bp, Artificial Sequence
  Synthetic: FXN 5 reverse 9:69036597-69036622; SpCas9
aaagccacgtctcagagaggtt

SEQ ID NO: 51345 - DNA, 21 bp, Artificial Sequence
  Synthetic: FXN 5 reverse 9:69036598-69036622; SpCas9
aagccacgtctcagagaggtt

SEQ ID NO: 51346 - DNA, 20 bp, Artificial Sequence
  Synthetic: FXN 5 reverse 9:69036599-69036622; SpCas9
agccacgtctcagagaggtt

SEQ ID NO: 51347 - DNA, 19 bp, Artificial Sequence
  Synthetic: FXN 5 reverse 9:69036600-69036622; SpCas9
gccacgtctcagagaggtt

SEQ ID NO: 51348 - DNA, 18 bp, Artificial Sequence
  Synthetic: FXN 5 reverse 9:69036601-69036622; SpCas9
ccacgtctcagagaggtt

SEQ ID NO: 51349 - DNA, 25 bp, Artificial Sequence
  Synthetic: FXN 5 reverse 9:69036595-69036623; SpCas9
aaacaaagccacgtctcagagaggt

SEQ ID NO: 51350 - DNA, 24 bp, Artificial Sequence
  Synthetic: FXN 5 reverse 9:69036596-69036623; SpCas9
aacaaagccacgtctcagagaggt

SEQ ID NO: 51351 - DNA, 23 bp, Artificial Sequence
  Synthetic: FXN 5 reverse 9:69036597-69036623; SpCas9
acaaagccacgtctcagagaggt

SEQ ID NO: 51352 - DNA, 22 bp, Artificial Sequence
  Synthetic: FXN 5 reverse 9:69036598-69036623; SpCas9
caaagccacgtctcagagaggt

SEQ ID NO: 51353 - DNA, 21 bp, Artificial Sequence
  Synthetic: FXN 5 reverse 9:69036599-69036623; SpCas9
aaagccacgtctcagagaggt

SEQ ID NO: 51354 - DNA, 20 bp, Artificial Sequence
  Synthetic: FXN 5 reverse 9:69036600-69036623; SpCas9
aagccacgtctcagagaggt

SEQ ID NO: 51355 - DNA, 19 bp, Artificial Sequence
  Synthetic: FXN 5 reverse 9:69036601-69036623; SpCas9
agccacgtctcagagaggt

SEQ ID NO: 51356 - DNA, 18 bp, Artificial Sequence
  Synthetic: FXN 5 reverse 9:69036602-69036623; SpCas9
gccacgtctcagagaggt

SEQ ID NO: 51357 - DNA, 25 bp, Artificial Sequence
  Synthetic: FXN 5 reverse 9:69036599-69036627; SpCas9
cagaaaacaaagccacgtctcagag

SEQ ID NO: 51358 - DNA, 24 bp, Artificial Sequence
  Synthetic: FXN 5 reverse 9:69036600-69036627; SpCas9
agaaaacaaagccacgtctcagag

SEQ ID NO: 51359 - DNA, 23 bp, Artificial Sequence
  Synthetic: FXN 5 reverse 9:69036601-69036627; SpCas9
gaaaacaaagccacgtctcagag

SEQ ID NO: 51360 - DNA, 22 bp, Artificial Sequence
  Synthetic: FXN 5 reverse 9:69036602-69036627; SpCas9
aaaacaaagccacgtctcagag

SEQ ID NO: 51361 - DNA, 21 bp, Artificial Sequence
  Synthetic: FXN 5 reverse 9:69036603-69036627; SpCas9
aaacaaagccacgtctcagag

SEQ ID NO: 51362 - DNA, 20 bp, Artificial Sequence
  Synthetic: FXN 5 reverse 9:69036604-69036627; SpCas9
aacaaagccacgtctcagag

SEQ ID NO: 51363 - DNA, 19 bp, Artificial Sequence
  Synthetic: FXN 5 reverse 9:69036605-69036627; SpCas9
acaaagccacgtctcagag

SEQ ID NO: 51364 - DNA, 18 bp, Artificial Sequence
  Synthetic: FXN 5 reverse 9:69036606-69036627; SpCas9
caaagccacgtctcagag

SEQ ID NO: 51365 - DNA, 25 bp, Artificial Sequence
  Synthetic: FXN 5 reverse 9:69036600-69036628; SpCas9
acagaaaacaaagccacgtctcaga

SEQ ID NO: 51366 - DNA, 24 bp, Artificial Sequence
  Synthetic: FXN 5 reverse 9:69036601-69036628; SpCas9
cagaaaacaaagccacgtctcaga

SEQ ID NO: 51367 - DNA, 23 bp, Artificial Sequence
  Synthetic: FXN 5 reverse 9:69036602-69036628; SpCas9
agaaaacaaagccacgtctcaga

SEQ ID NO: 51368 - DNA, 22 bp, Artificial Sequence
  Synthetic: FXN 5 reverse 9:69036603-69036628; SpCas9
gaaaacaaagccacgtctcaga

SEQ ID NO: 51369 - DNA, 21 bp, Artificial Sequence
  Synthetic: FXN 5 reverse 9:69036604-69036628; SpCas9
aaaacaaagccacgtctcaga

SEQ ID NO: 51370 - DNA, 20 bp, Artificial Sequence
  Synthetic: FXN 5 reverse 9:69036605-69036628; SpCas9
aaacaaagccacgtctcaga

SEQ ID NO: 51371 - DNA, 19 bp, Artificial Sequence
  Synthetic: FXN 5 reverse 9:69036606-69036628; SpCas9
aacaaagccacgtctcaga

SEQ ID NO: 51372 - DNA, 18 bp, Artificial Sequence
  Synthetic: FXN 5 reverse 9:69036607-69036628; SpCas9
acaaagccacgtctcaga

SEQ ID NO: 51373 - DNA, 25 bp, Artificial Sequence
  Synthetic: FXN 5 forward 9:69036602-69036630; SpCas9
ctctgagacgtggctttgttttctg

SEQ ID NO: 51374 - DNA, 24 bp, Artificial Sequence
  Synthetic: FXN 5 forward 9:69036603-69036630; SpCas9
tctgagacgtggctttgttttctg

SEQ ID NO: 51375 - DNA, 23 bp, Artificial Sequence
  Synthetic: FXN 5 forward 9:69036604-69036630; SpCas9
ctgagacgtggctttgttttctg

SEQ ID NO: 51376 - DNA, 22 bp, Artificial Sequence
  Synthetic: FXN 5 forward 9:69036605-69036630; SpCas9
tgagacgtggctttgttttctg

SEQ ID NO: 51377 - DNA, 21 bp, Artificial Sequence
  Synthetic: FXN 5 forward 9:69036606-69036630; SpCas9
gagacgtggctttgttttctg

SEQ ID NO: 51378 - DNA, 20 bp, Artificial Sequence
  Synthetic: FXN 5 forward 9:69036607-69036630; SpCas9
agacgtggctttgttttctg

SEQ ID NO: 51379 - DNA, 19 bp, Artificial Sequence
  Synthetic: FXN 5 forward 9:69036608-69036630; SpCas9
gacgtggctttgttttctg

SEQ ID NO: 51380 - DNA, 18 bp, Artificial Sequence
  Synthetic: FXN 5 forward 9:69036609-69036630; SpCas9
acgtggctttgttttctg

SEQ ID NO: 51381 - DNA, 25 bp, Artificial Sequence
  Synthetic: FXN 5 reverse 9:69036602-69036630; SpCas9
ctacagaaaacaaagccacgtctca

SEQ ID NO: 51382 - DNA, 24 bp, Artificial Sequence
  Synthetic: FXN 5 reverse 9:69036603-69036630; SpCas9
tacagaaaacaaagccacgtctca

SEQ ID NO: 51383 - DNA, 23 bp, Artificial Sequence
  Synthetic: FXN 5 reverse 9:69036604-69036630; SpCas9
acagaaaacaaagccacgtctca

SEQ ID NO: 51384 - DNA, 22 bp, Artificial Sequence
  Synthetic: FXN 5 reverse 9:69036605-69036630; SpCas9
cagaaaacaaagccacgtctca

SEQ ID NO: 51385 - DNA, 21 bp, Artificial Sequence
  Synthetic: FXN 5 reverse 9:69036606-69036630; SpCas9
agaaaacaaagccacgtctca

SEQ ID NO: 51386 - DNA, 20 bp, Artificial Sequence
  Synthetic: FXN 5 reverse 9:69036607-69036630; SpCas9
gaaaacaaagccacgtctca

SEQ ID NO: 51387 - DNA, 19 bp, Artificial Sequence
  Synthetic: FXN 5 reverse 9:69036608-69036630; SpCas9
aaaacaaagccacgtctca

SEQ ID NO: 51388 - DNA, 18 bp, Artificial Sequence
  Synthetic: FXN 5 reverse 9:69036609-69036630; SpCas9
aaacaaagccacgtctca

SEQ ID NO: 51389 - DNA, 25 bp, Artificial Sequence
  Synthetic: FXN 5 forward 9:69036603-69036631; SpCas9
tctgagacgtggctttgttttctgt

SEQ ID NO: 51390 - DNA, 24 bp, Artificial Sequence
  Synthetic: FXN 5 forward 9:69036604-69036631; SpCas9
ctgagacgtggctttgttttctgt

SEQ ID NO: 51391 - DNA, 23 bp, Artificial Sequence
  Synthetic: FXN 5 forward 9:69036605-69036631; SpCas9
tgagacgtggctttgttttctgt

SEQ ID NO: 51392 - DNA, 22 bp, Artificial Sequence
  Synthetic: FXN 5 forward 9:69036606-69036631; SpCas9
gagacgtggctttgttttctgt

SEQ ID NO: 51393 - DNA, 21 bp, Artificial Sequence
  Synthetic: FXN 5 forward 9:69036607-69036631; SpCas9
agacgtggctttgttttctgt

SEQ ID NO: 51394 - DNA, 20 bp, Artificial Sequence
  Synthetic: FXN 5 forward 9:69036608-69036631; SpCas9
gacgtggctttgttttctgt

SEQ ID NO: 51395 - DNA, 19 bp, Artificial Sequence
  Synthetic: FXN 5 forward 9:69036609-69036631; SpCas9
acgtggctttgttttctgt

SEQ ID NO: 51396 - DNA, 18 bp, Artificial Sequence
  Synthetic: FXN 5 forward 9:69036610-69036631; SpCas9
cgtggctttgttttctgt

SEQ ID NO: 51397 - DNA, 25 bp, Artificial Sequence
  Synthetic: FXN 5 forward 9:69036604-69036632; SpCas9
ctgagacgtggctttgttttctgta

SEQ ID NO: 51398 - DNA, 24 bp, Artificial Sequence
  Synthetic: FXN 5 forward 9:69036605-69036632; SpCas9
tgagacgtggctttgttttctgta

SEQ ID NO: 51399 - DNA, 23 bp, Artificial Sequence
  Synthetic: FXN 5 forward 9:69036606-69036632; SpCas9
gagacgtggctttgttttctgta

SEQ ID NO: 51400 - DNA, 22 bp, Artificial Sequence
  Synthetic: FXN 5 forward 9:69036607-69036632; SpCas9
agacgtggctttgttttctgta

SEQ ID NO: 51401 - DNA, 21 bp, Artificial Sequence
  Synthetic: FXN 5 forward 9:69036608-69036632; SpCas9
gacgtggctttgttttctgta

SEQ ID NO: 51402 - DNA, 20 bp, Artificial Sequence
  Synthetic: FXN 5 forward 9:69036609-69036632; SpCas9
acgtggctttgttttctgta

SEQ ID NO: 51403 - DNA, 19 bp, Artificial Sequence
  Synthetic: FXN 5 forward 9:69036610-69036632; SpCas9
cgtggctttgttttctgta

SEQ ID NO: 51404 - DNA, 18 bp, Artificial Sequence
  Synthetic: FXN 5 forward 9:69036611-69036632; SpCas9
gtggctttgttttctgta

SEQ ID NO: 51405 - DNA, 25 bp, Artificial Sequence
  Synthetic: FXN 5 reverse 9:69036604-69036632; SpCas9
ccctacagaaaacaaagccacgtct

SEQ ID NO: 51406 - DNA, 24 bp, Artificial Sequence
  Synthetic: FXN 5 reverse 9:69036605-69036632; SpCas9
cctacagaaaacaaagccacgtct

SEQ ID NO: 51407 - DNA, 23 bp, Artificial Sequence
  Synthetic: FXN 5 reverse 9:69036606-69036632; SpCas9
ctacagaaaacaaagccacgtct

SEQ ID NO: 51408 - DNA, 22 bp, Artificial Sequence
  Synthetic: FXN 5 reverse 9:69036607-69036632; SpCas9
tacagaaaacaaagccacgtct

SEQ ID NO: 51409 - DNA, 21 bp, Artificial Sequence
  Synthetic: FXN 5 reverse 9:69036608-69036632; SpCas9
acagaaaacaaagccacgtct

SEQ ID NO: 51410 - DNA, 20 bp, Artificial Sequence
  Synthetic: FXN 5 reverse 9:69036609-69036632; SpCas9
cagaaaacaaagccacgtct

SEQ ID NO: 51411 - DNA, 19 bp, Artificial Sequence
  Synthetic: FXN 5 reverse 9:69036610-69036632; SpCas9
agaaaacaaagccacgtct

SEQ ID NO: 51412 - DNA, 18 bp, Artificial Sequence
  Synthetic: FXN 5 reverse 9:69036611-69036632; SpCas9
gaaaacaaagccacgtct

SEQ ID NO: 51413 - DNA, 25 bp, Artificial Sequence
  Synthetic: FXN 5 forward 9:69036606-69036634; SpCas9
gagacgtggctttgttttctgtagg

SEQ ID NO: 51414 - DNA, 24 bp, Artificial Sequence
  Synthetic: FXN 5 forward 9:69036607-69036634; SpCas9
agacgtggctttgttttctgtagg

SEQ ID NO: 51415 - DNA, 23 bp, Artificial Sequence
  Synthetic: FXN 5 forward 9:69036608-69036634; SpCas9
gacgtggctttgttttctgtagg

SEQ ID NO: 51416 - DNA, 22 bp, Artificial Sequence
  Synthetic: FXN 5 forward 9:69036609-69036634; SpCas9
acgtggctttgttttctgtagg

SEQ ID NO: 51417 - DNA, 21 bp, Artificial Sequence
  Synthetic: FXN 5 forward 9:69036610-69036634; SpCas9
cgtggctttgttttctgtagg

SEQ ID NO: 51418 - DNA, 20 bp, Artificial Sequence
  Synthetic: FXN 5 forward 9:69036611-69036634; SpCas9
gtggctttgttttctgtagg

SEQ ID NO: 51419 - DNA, 19 bp, Artificial Sequence
  Synthetic: FXN 5 forward 9:69036612-69036634; SpCas9
tggctttgttttctgtagg

SEQ ID NO: 51420 - DNA, 18 bp, Artificial Sequence
  Synthetic: FXN 5 forward 9:69036613-69036634; SpCas9
ggctttgttttctgtagg

SEQ ID NO: 51421 - DNA, 25 bp, Artificial Sequence
  Synthetic: FXN 5 forward 9:69036609-69036637; SpCas9
acgtggctttgttttctgtagggag

SEQ ID NO: 51422 - DNA, 24 bp, Artificial Sequence
  Synthetic: FXN 5 forward 9:69036610-69036637; SpCas9
cgtggctttgttttctgtagggag

SEQ ID NO: 51423 - DNA, 23 bp, Artificial Sequence
  Synthetic: FXN 5 forward 9:69036611-69036637; SpCas9
gtggctttgttttctgtagggag

SEQ ID NO: 51424 - DNA, 22 bp, Artificial Sequence
  Synthetic: FXN 5 forward 9:69036612-69036637; SpCas9
tggctttgttttctgtagggag

SEQ ID NO: 51425 - DNA, 21 bp, Artificial Sequence
  Synthetic: FXN 5 forward 9:69036613-69036637; SpCas9
ggctttgttttctgtagggag

SEQ ID NO: 51426 - DNA, 20 bp, Artificial Sequence
  Synthetic: FXN 5 forward 9:69036614-69036637; SpCas9
gctttgttttctgtagggag

SEQ ID NO: 51427 - DNA, 19 bp, Artificial Sequence
  Synthetic: FXN 5 forward 9:69036615-69036637; SpCas9
ctttgttttctgtagggag

SEQ ID NO: 51428 - DNA, 18 bp, Artificial Sequence
  Synthetic: FXN 5 forward 9:69036616-69036637; SpCas9
tttgttttctgtagggag

SEQ ID NO: 51429 - DNA, 25 bp, Artificial Sequence
  Synthetic: FXN 5 forward 9:69036615-69036643; SpCas9
ctttgttttctgtagggagaagata

SEQ ID NO: 51430 - DNA, 24 bp, Artificial Sequence
  Synthetic: FXN 5 forward 9:69036616-69036643; SpCas9
tttgttttctgtagggagaagata

SEQ ID NO: 51431 - DNA, 23 bp, Artificial Sequence
  Synthetic: FXN 5 forward 9:69036617-69036643; SpCas9
ttgttttctgtagggagaagata

SEQ ID NO: 51432 - DNA, 22 bp, Artificial Sequence
  Synthetic: FXN 5 forward 9:69036618-69036643; SpCas9
tgttttctgtagggagaagata

SEQ ID NO: 51433 - DNA, 21 bp, Artificial Sequence
  Synthetic: FXN 5 forward 9:69036619-69036643; SpCas9
gttttctgtagggagaagata

SEQ ID NO: 51434 - DNA, 20 bp, Artificial Sequence
  Synthetic: FXN 5 forward 9:69036620-69036643; SpCas9
ttttctgtagggagaagata

SEQ ID NO: 51435 - DNA, 19 bp, Artificial Sequence
  Synthetic: FXN 5 forward 9:69036621-69036643; SpCas9
tttctgtagggagaagata

SEQ ID NO: 51436 - DNA, 18 bp, Artificial Sequence
  Synthetic: FXN 5 forward 9:69036622-69036643; SpCas9
ttctgtagggagaagata

SEQ ID NO: 51437 - DNA, 25 bp, Artificial Sequence
  Synthetic: FXN 5 reverse 9:69036615-69036643; SpCas9
ctttatcttctccctacagaaaaca

SEQ ID NO: 51438 - DNA, 24 bp, Artificial Sequence
  Synthetic: FXN 5 reverse 9:69036616-69036643; SpCas9
tttatcttctccctacagaaaaca

SEQ ID NO: 51439 - DNA, 23 bp, Artificial Sequence
  Synthetic: FXN 5 reverse 9:69036617-69036643; SpCas9
ttatcttctccctacagaaaaca

SEQ ID NO: 51440 - DNA, 22 bp, Artificial Sequence
  Synthetic: FXN 5 reverse 9:69036618-69036643; SpCas9
tatcttctccctacagaaaaca

SEQ ID NO: 51441 - DNA, 21 bp, Artificial Sequence
  Synthetic: FXN 5 reverse 9:69036619-69036643; SpCas9
atcttctccctacagaaaaca

SEQ ID NO: 51442 - DNA, 20 bp, Artificial Sequence
  Synthetic: FXN 5 reverse 9:69036620-69036643; SpCas9
tcttctccctacagaaaaca

SEQ ID NO: 51443 - DNA, 19 bp, Artificial Sequence
  Synthetic: FXN 5 reverse 9:69036621-69036643; SpCas9
cttctccctacagaaaaca

SEQ ID NO: 51444 - DNA, 18 bp, Artificial Sequence
  Synthetic: FXN 5 reverse 9:69036622-69036643; SpCas9
ttctccctacagaaaaca

SEQ ID NO: 51445 - DNA, 25 bp, Artificial Sequence
  Synthetic: FXN 5 forward 9:69036616-69036644; SpCas9
tttgttttctgtagggagaagataa

SEQ ID NO: 51446 - DNA, 24 bp, Artificial Sequence
  Synthetic: FXN 5 forward 9:69036617-69036644; SpCas9
ttgttttctgtagggagaagataa

SEQ ID NO: 51447 - DNA, 23 bp, Artificial Sequence
  Synthetic: FXN 5 forward 9:69036618-69036644; SpCas9
tgttttctgtagggagaagataa

SEQ ID NO: 51448 - DNA, 22 bp, Artificial Sequence
  Synthetic: FXN 5 forward 9:69036619-69036644; SpCas9
gttttctgtagggagaagataa

SEQ ID NO: 51449 - DNA, 21 bp, Artificial Sequence
  Synthetic: FXN 5 forward 9:69036620-69036644; SpCas9
ttttctgtagggagaagataa

SEQ ID NO: 51450 - DNA, 20 bp, Artificial Sequence
  Synthetic: FXN 5 forward 9:69036621-69036644; SpCas9
tttctgtagggagaagataa

SEQ ID NO: 51451 - DNA, 19 bp, Artificial Sequence
  Synthetic: FXN 5 forward 9:69036622-69036644; SpCas9
ttctgtagggagaagataa

SEQ ID NO: 51452 - DNA, 18 bp, Artificial Sequence
  Synthetic: FXN 5 forward 9:69036623-69036644; SpCas9
tctgtagggagaagataa

SEQ ID NO: 51453 - DNA, 25 bp, Artificial Sequence
  Synthetic: FXN 5 reverse 9:69036624-69036652; SpCas9
gggcgtcacctttatcttctcccta

SEQ ID NO: 51454 - DNA, 24 bp, Artificial Sequence
  Synthetic: FXN 5 reverse 9:69036625-69036652; SpCas9
ggcgtcacctttatcttctcccta

SEQ ID NO: 51455 - DNA, 23 bp, Artificial Sequence
  Synthetic: FXN 5 reverse 9:69036626-69036652; SpCas9
gcgtcacctttatcttctcccta

SEQ ID NO: 51456 - DNA, 22 bp, Artificial Sequence
  Synthetic: FXN 5 reverse 9:69036627-69036652; SpCas9
cgtcacctttatcttctcccta

SEQ ID NO: 51457 - DNA, 21 bp, Artificial Sequence
  Synthetic: FXN 5 reverse 9:69036628-69036652; SpCas9
gtcacctttatcttctcccta

SEQ ID NO: 51458 - DNA, 20 bp, Artificial Sequence
  Synthetic: FXN 5 reverse 9:69036629-69036652; SpCas9
tcacctttatcttctcccta

SEQ ID NO: 51459 - DNA, 19 bp, Artificial Sequence
  Synthetic: FXN 5 reverse 9:69036630-69036652; SpCas9
cacctttatcttctcccta

SEQ ID NO: 51460 - DNA, 18 bp, Artificial Sequence
  Synthetic: FXN 5 reverse 9:69036631-69036652; SpCas9
acctttatcttctcccta

SEQ ID NO: 51461 - DNA, 25 bp, Artificial Sequence
  Synthetic: FXN 5 forward 9:69036633-69036661; SpCas9
gaagataaaggtgacgcccattttg

SEQ ID NO: 51462 - DNA, 24 bp, Artificial Sequence
  Synthetic: FXN 5 forward 9:69036634-69036661; SpCas9
aagataaaggtgacgcccattttg

SEQ ID NO: 51463 - DNA, 23 bp, Artificial Sequence
  Synthetic: FXN 5 forward 9:69036635-69036661; SpCas9
agataaaggtgacgcccattttg

SEQ ID NO: 51464 - DNA, 22 bp, Artificial Sequence
  Synthetic: FXN 5 forward 9:69036636-69036661; SpCas9
gataaaggtgacgcccattttg

SEQ ID NO: 51465 - DNA, 21 bp, Artificial Sequence
  Synthetic: FXN 5 forward 9:69036637-69036661; SpCas9
ataaaggtgacgcccattttg

SEQ ID NO: 51466 - DNA, 20 bp, Artificial Sequence
  Synthetic: FXN 5 forward 9:69036638-69036661; SpCas9
taaaggtgacgcccattttg

SEQ ID NO: 51467 - DNA, 19 bp, Artificial Sequence
  Synthetic: FXN 5 forward 9:69036639-69036661; SpCas9
aaaggtgacgcccattttg

SEQ ID NO: 51468 - DNA, 18 bp, Artificial Sequence
  Synthetic: FXN 5 forward 9:69036640-69036661; SpCas9
aaggtgacgcccattttg

SEQ ID NO: 51469 - DNA, 25 bp, Artificial Sequence
  Synthetic: FXN 5 forward 9:69036639-69036667; SpCas9
aaaggtgacgcccattttgcggacc

SEQ ID NO: 51470 - DNA, 24 bp, Artificial Sequence
  Synthetic: FXN 5 forward 9:69036640-69036667; SpCas9
aaggtgacgcccattttgcggacc

SEQ ID NO: 51471 - DNA, 23 bp, Artificial Sequence
  Synthetic: FXN 5 forward 9:69036641-69036667; SpCas9
aggtgacgcccattttgcggacc

SEQ ID NO: 51472 - DNA, 22 bp, Artificial Sequence
  Synthetic: FXN 5 forward 9:69036642-69036667; SpCas9
ggtgacgcccattttgcggacc

SEQ ID NO: 51473 - DNA, 21 bp, Artificial Sequence
  Synthetic: FXN 5 forward 9:69036643-69036667; SpCas9
gtgacgcccattttgcggacc

SEQ ID NO: 51474 - DNA, 20 bp, Artificial Sequence
  Synthetic: FXN 5 forward 9:69036644-69036667; SpCas9
tgacgcccattttgcggacc

SEQ ID NO: 51475 - DNA, 19 bp, Artificial Sequence
  Synthetic: FXN 5 forward 9:69036645-69036667; SpCas9
gacgcccattttgcggacc

SEQ ID NO: 51476 - DNA, 18 bp, Artificial Sequence
  Synthetic: FXN 5 forward 9:69036646-69036667; SpCas9
acgcccattttgcggacc

SEQ ID NO: 51477 - DNA, 25 bp, Artificial Sequence
  Synthetic: FXN 5 forward 9:69036645-69036673; SpCas9
gacgcccattttgcggacctggtgt

SEQ ID NO: 51478 - DNA, 24 bp, Artificial Sequence
  Synthetic: FXN 5 forward 9:69036646-69036673; SpCas9
acgcccattttgcggacctggtgt

SEQ ID NO: 51479 - DNA, 23 bp, Artificial Sequence
  Synthetic: FXN 5 forward 9:69036647-69036673; SpCas9
cgcccattttgcggacctggtgt

SEQ ID NO: 51480 - DNA, 22 bp, Artificial Sequence
  Synthetic: FXN 5 forward 9:69036648-69036673; SpCas9
gcccattttgcggacctggtgt

SEQ ID NO: 51481 - DNA, 21 bp, Artificial Sequence
  Synthetic: FXN 5 forward 9:69036649-69036673; SpCas9
cccattttgcggacctggtgt

SEQ ID NO: 51482 - DNA, 20 bp, Artificial Sequence
  Synthetic: FXN 5 forward 9:69036650-69036673; SpCas9
ccattttgcggacctggtgt

SEQ ID NO: 51483 - DNA, 19 bp, Artificial Sequence
  Synthetic: FXN 5 forward 9:69036651-69036673; SpCas9
cattttgcggacctggtgt

SEQ ID NO: 51484 - DNA, 18 bp, Artificial Sequence
  Synthetic: FXN 5 forward 9:69036652-69036673; SpCas9
attttgcggacctggtgt

SEQ ID NO: 51485 - DNA, 25 bp, Artificial Sequence
  Synthetic: FXN 5 forward 9:69036646-69036674; SpCas9
acgcccattttgcggacctggtgtg

SEQ ID NO: 51486 - DNA, 24 bp, Artificial Sequence
  Synthetic: FXN 5 forward 9:69036647-69036674; SpCas9
cgcccattttgcggacctggtgtg

SEQ ID NO: 51487 - DNA, 23 bp, Artificial Sequence
  Synthetic: FXN 5 forward 9:69036648-69036674; SpCas9
gcccattttgcggacctggtgtg

SEQ ID NO: 51488 - DNA, 22 bp, Artificial Sequence
  Synthetic: FXN 5 forward 9:69036649-69036674; SpCas9
cccattttgcggacctggtgtg

SEQ ID NO: 51489 - DNA, 21 bp, Artificial Sequence
  Synthetic: FXN 5 forward 9:69036650-69036674; SpCas9
ccattttgcggacctggtgtg

SEQ ID NO: 51490 - DNA, 20 bp, Artificial Sequence
  Synthetic: FXN 5 forward 9:69036651-69036674; SpCas9
cattttgcggacctggtgtg

SEQ ID NO: 51491 - DNA, 19 bp, Artificial Sequence
  Synthetic: FXN 5 forward 9:69036652-69036674; SpCas9
attttgcggacctggtgtg

SEQ ID NO: 51492 - DNA, 18 bp, Artificial Sequence
  Synthetic: FXN 5 forward 9:69036653-69036674; SpCas9
ttttgcggacctggtgtg

SEQ ID NO: 51493 - DNA, 25 bp, Artificial Sequence
  Synthetic: FXN 5 reverse 9:69036649-69036677; SpCas9
aatcctcacaccaggtccgcaaaat

SEQ ID NO: 51494 - DNA, 24 bp, Artificial Sequence
  Synthetic: FXN 5 reverse 9:69036650-69036677; SpCas9
atcctcacaccaggtccgcaaaat

SEQ ID NO: 51495 - DNA, 23 bp, Artificial Sequence
  Synthetic: FXN 5 reverse 9:69036651-69036677; SpCas9
tcctcacaccaggtccgcaaaat

SEQ ID NO: 51496 - DNA, 22 bp, Artificial Sequence
  Synthetic: FXN 5 reverse 9:69036652-69036677; SpCas9
cctcacaccaggtccgcaaaat

SEQ ID NO: 51497 - DNA, 21 bp, Artificial Sequence
  Synthetic: FXN 5 reverse 9:69036653-69036677; SpCas9
ctcacaccaggtccgcaaaat

SEQ ID NO: 51498 - DNA, 20 bp, Artificial Sequence
  Synthetic: FXN 5 reverse 9:69036654-69036677; SpCas9
tcacaccaggtccgcaaaat

SEQ ID NO: 51499 - DNA, 19 bp, Artificial Sequence
  Synthetic: FXN 5 reverse 9:69036655-69036677; SpCas9
cacaccaggtccgcaaaat

SEQ ID NO: 51500 - DNA, 18 bp, Artificial Sequence
  Synthetic: FXN 5 reverse 9:69036656-69036677; SpCas9
acaccaggtccgcaaaat

SEQ ID NO: 51501 - DNA, 25 bp, Artificial Sequence
  Synthetic: FXN 5 reverse 9:69036650-69036678; SpCas9
taatcctcacaccaggtccgcaaaa

SEQ ID NO: 51502 - DNA, 24 bp, Artificial Sequence
  Synthetic: FXN 5 reverse 9:69036651-69036678; SpCas9
aatcctcacaccaggtccgcaaaa

SEQ ID NO: 51503 - DNA, 23 bp, Artificial Sequence
  Synthetic: FXN 5 reverse 9:69036652-69036678; SpCas9
atcctcacaccaggtccgcaaaa

SEQ ID NO: 51504 - DNA, 22 bp, Artificial Sequence
  Synthetic: FXN 5 reverse 9:69036653-69036678; SpCas9
tcctcacaccaggtccgcaaaa

SEQ ID NO: 51505 - DNA, 21 bp, Artificial Sequence
  Synthetic: FXN 5 reverse 9:69036654-69036678; SpCas9
cctcacaccaggtccgcaaaa

SEQ ID NO: 51506 - DNA, 20 bp, Artificial Sequence
  Synthetic: FXN 5 reverse 9:69036655-69036678; SpCas9
ctcacaccaggtccgcaaaa

SEQ ID NO: 51507 - DNA, 19 bp, Artificial Sequence
  Synthetic: FXN 5 reverse 9:69036656-69036678; SpCas9
tcacaccaggtccgcaaaa

SEQ ID NO: 51508 - DNA, 18 bp, Artificial Sequence
  Synthetic: FXN 5 reverse 9:69036657-69036678; SpCas9
cacaccaggtccgcaaaa

SEQ ID NO: 51509 - DNA, 25 bp, Artificial Sequence
  Synthetic: FXN 5 forward 9:69036655-69036683; SpCas9
ttgcggacctggtgtgaggattaaa

SEQ ID NO: 51510 - DNA, 24 bp, Artificial Sequence
  Synthetic: FXN 5 forward 9:69036656-69036683; SpCas9
tgcggacctggtgtgaggattaaa

SEQ ID NO: 51511 - DNA, 23 bp, Artificial Sequence
  Synthetic: FXN 5 forward 9:69036657-69036683; SpCas9
gcggacctggtgtgaggattaaa

SEQ ID NO: 51512 - DNA, 22 bp, Artificial Sequence
  Synthetic: FXN 5 forward 9:69036658-69036683; SpCas9
cggacctggtgtgaggattaaa

SEQ ID NO: 51513 - DNA, 21 bp, Artificial Sequence
  Synthetic: FXN 5 forward 9:69036659-69036683; SpCas9
ggacctggtgtgaggattaaa

SEQ ID NO: 51514 - DNA, 20 bp, Artificial Sequence
  Synthetic: FXN 5 forward 9:69036660-69036683; SpCas9
gacctggtgtgaggattaaa

SEQ ID NO: 51515 - DNA, 19 bp, Artificial Sequence
  Synthetic: FXN 5 forward 9:69036661-69036683; SpCas9
acctggtgtgaggattaaa

SEQ ID NO: 51516 - DNA, 18 bp, Artificial Sequence
  Synthetic: FXN 5 forward 9:69036662-69036683; SpCas9
cctggtgtgaggattaaa

SEQ ID NO: 51517 - DNA, 25 bp, Artificial Sequence
  Synthetic: FXN 5 forward 9:69036656-69036684; SpCas9
tgcggacctggtgtgaggattaaat

SEQ ID NO: 51518 - DNA, 24 bp, Artificial Sequence
  Synthetic: FXN 5 forward 9:69036657-69036684; SpCas9
gcggacctggtgtgaggattaaat

SEQ ID NO: 51519 - DNA, 23 bp, Artificial Sequence
  Synthetic: FXN 5 forward 9:69036658-69036684; SpCas9
cggacctggtgtgaggattaaat

SEQ ID NO: 51520 - DNA, 22 bp, Artificial Sequence
  Synthetic: FXN 5 forward 9:69036659-69036684; SpCas9
ggacctggtgtgaggattaaat

SEQ ID NO: 51521 - DNA, 21 bp, Artificial Sequence
  Synthetic: FXN 5 forward 9:69036660-69036684; SpCas9
gacctggtgtgaggattaaat

SEQ ID NO: 51522 - DNA, 20 bp, Artificial Sequence
  Synthetic: FXN 5 forward 9:69036661-69036684; SpCas9
acctggtgtgaggattaaat

SEQ ID NO: 51523 - DNA, 19 bp, Artificial Sequence
  Synthetic: FXN 5 forward 9:69036662-69036684; SpCas9
cctggtgtgaggattaaat

SEQ ID NO: 51524 - DNA, 18 bp, Artificial Sequence
  Synthetic: FXN 5 forward 9:69036663-69036684; SpCas9
ctggtgtgaggattaaat

SEQ ID NO: 51525 - DNA, 25 bp, Artificial Sequence
  Synthetic: FXN 5 reverse 9:69036662-69036690; SpCas9
gttattcccatttaatcctcacacc

SEQ ID NO: 51526 - DNA, 24 bp, Artificial Sequence
  Synthetic: FXN 5 reverse 9:69036663-69036690; SpCas9
ttattcccatttaatcctcacacc

SEQ ID NO: 51527 - DNA, 23 bp, Artificial Sequence
  Synthetic: FXN 5 reverse 9:69036664-69036690; SpCas9
tattcccatttaatcctcacacc

SEQ ID NO: 51528 - DNA, 22 bp, Artificial Sequence
  Synthetic: FXN 5 reverse 9:69036665-69036690; SpCas9
attcccatttaatcctcacacc

SEQ ID NO: 51529 - DNA, 21 bp, Artificial Sequence
  Synthetic: FXN 5 reverse 9:69036666-69036690; SpCas9
ttcccatttaatcctcacacc

SEQ ID NO: 51530 - DNA, 20 bp, Artificial Sequence
  Synthetic: FXN 5 reverse 9:69036667-69036690; SpCas9
tcccatttaatcctcacacc

SEQ ID NO: 51531 - DNA, 19 bp, Artificial Sequence
  Synthetic: FXN 5 reverse 9:69036668-69036690; SpCas9
cccatttaatcctcacacc

SEQ ID NO: 51532 - DNA, 18 bp, Artificial Sequence
  Synthetic: FXN 5 reverse 9:69036669-69036690; SpCas9
ccatttaatcctcacacc

SEQ ID NO: 51533 - DNA, 25 bp, Artificial Sequence
  Synthetic: FXN 5 reverse 9:69036663-69036691; SpCas9
tgttattcccatttaatcctcacac

SEQ ID NO: 51534 - DNA, 24 bp, Artificial Sequence
  Synthetic: FXN 5 reverse 9:69036664-69036691; SpCas9
gttattcccatttaatcctcacac

SEQ ID NO: 51535 - DNA, 23 bp, Artificial Sequence
  Synthetic: FXN 5 reverse 9:69036665-69036691; SpCas9
ttattcccatttaatcctcacac

SEQ ID NO: 51536 - DNA, 22 bp, Artificial Sequence
  Synthetic: FXN 5 reverse 9:69036666-69036691; SpCas9
tattcccatttaatcctcacac

SEQ ID NO: 51537 - DNA, 21 bp, Artificial Sequence
  Synthetic: FXN 5 reverse 9:69036667-69036691; SpCas9
attcccatttaatcctcacac

SEQ ID NO: 51538 - DNA, 20 bp, Artificial Sequence
  Synthetic: FXN 5 reverse 9:69036668-69036691; SpCas9
ttcccatttaatcctcacac

SEQ ID NO: 51539 - DNA, 19 bp, Artificial Sequence
  Synthetic: FXN 5 reverse 9:69036669-69036691; SpCas9
tcccatttaatcctcacac

SEQ ID NO: 51540 - DNA, 18 bp, Artificial Sequence
  Synthetic: FXN 5 reverse 9:69036670-69036691; SpCas9
cccatttaatcctcacac

SEQ ID NO: 51541 - DNA, 25 bp, Artificial Sequence
  Synthetic: FXN 5 forward 9:69036666-69036694; SpCas9
gtgtgaggattaaatgggaataaca

SEQ ID NO: 51542 - DNA, 24 bp, Artificial Sequence
  Synthetic: FXN 5 forward 9:69036667-69036694; SpCas9
tgtgaggattaaatgggaataaca

SEQ ID NO: 51543 - DNA, 23 bp, Artificial Sequence
  Synthetic: FXN 5 forward 9:69036668-69036694; SpCas9
gtgaggattaaatgggaataaca

SEQ ID NO: 51544 - DNA, 22 bp, Artificial Sequence
  Synthetic: FXN 5 forward 9:69036669-69036694; SpCas9
tgaggattaaatgggaataaca

SEQ ID NO: 51545 - DNA, 21 bp, Artificial Sequence
  Synthetic: FXN 5 forward 9:69036670-69036694; SpCas9
gaggattaaatgggaataaca

SEQ ID NO: 51546 - DNA, 20 bp, Artificial Sequence
  Synthetic: FXN 5 forward 9:69036671-69036694; SpCas9
aggattaaatgggaataaca

SEQ ID NO: 51547 - DNA, 19 bp, Artificial Sequence
  Synthetic: FXN 5 forward 9:69036672-69036694; SpCas9
ggattaaatgggaataaca

SEQ ID NO: 51548 - DNA, 18 bp, Artificial Sequence
  Synthetic: FXN 5 forward 9:69036673-69036694; SpCas9
gattaaatgggaataaca

SEQ ID NO: 51549 - DNA, 25 bp, Artificial Sequence
  Synthetic: FXN 5 forward 9:69036672-69036700; SpCas9
ggattaaatgggaataacatagata

SEQ ID NO: 51550 - DNA, 24 bp, Artificial Sequence
  Synthetic: FXN 5 forward 9:69036673-69036700; SpCas9
gattaaatgggaataacatagata

SEQ ID NO: 51551 - DNA, 23 bp, Artificial Sequence
  Synthetic: FXN 5 forward 9:69036674-69036700; SpCas9
attaaatgggaataacatagata

SEQ ID NO: 51552 - DNA, 22 bp, Artificial Sequence
  Synthetic: FXN 5 forward 9:69036675-69036700; SpCas9
ttaaatgggaataacatagata

SEQ ID NO: 51553 - DNA, 21 bp, Artificial Sequence
  Synthetic: FXN 5 forward 9:69036676-69036700; SpCas9
taaatgggaataacatagata

SEQ ID NO: 51554 - DNA, 20 bp, Artificial Sequence
  Synthetic: FXN 5 forward 9:69036677-69036700; SpCas9
aaatgggaataacatagata

SEQ ID NO: 51555 - DNA, 19 bp, Artificial Sequence
  Synthetic: FXN 5 forward 9:69036678-69036700; SpCas9
aatgggaataacatagata

SEQ ID NO: 51556 - DNA, 18 bp, Artificial Sequence
  Synthetic: FXN 5 forward 9:69036679-69036700; SpCas9
atgggaataacatagata

SEQ ID NO: 51557 - DNA, 25 bp, Artificial Sequence
  Synthetic: FXN 5 forward 9:69036679-69036707; SpCas9
atgggaataacatagataaagtctt

SEQ ID NO: 51558 - DNA, 24 bp, Artificial Sequence
  Synthetic: FXN 5 forward 9:69036680-69036707; SpCas9
tgggaataacatagataaagtctt

SEQ ID NO: 51559 - DNA, 23 bp, Artificial Sequence
  Synthetic: FXN 5 forward 9:69036681-69036707; SpCas9
gggaataacatagataaagtctt

SEQ ID NO: 51560 - DNA, 22 bp, Artificial Sequence
  Synthetic: FXN 5 forward 9:69036682-69036707; SpCas9
ggaataacatagataaagtctt

SEQ ID NO: 51561 - DNA, 21 bp, Artificial Sequence
  Synthetic: FXN 5 forward 9:69036683-69036707; SpCas9
gaataacatagataaagtctt

SEQ ID NO: 51562 - DNA, 20 bp, Artificial Sequence
  Synthetic: FXN 5 forward 9:69036684-69036707; SpCas9
aataacatagataaagtctt

SEQ ID NO: 51563 - DNA, 19 bp, Artificial Sequence
  Synthetic: FXN 5 forward 9:69036685-69036707; SpCas9
ataacatagataaagtctt

SEQ ID NO: 51564 - DNA, 18 bp, Artificial Sequence
  Synthetic: FXN 5 forward 9:69036686-69036707; SpCas9
taacatagataaagtctt

SEQ ID NO: 51565 - DNA, 25 bp, Artificial Sequence
  Synthetic: FXN 5 forward 9:69036692-69036720; SpCas9
agataaagtcttcagaacttcaaat

SEQ ID NO: 51566 - DNA, 24 bp, Artificial Sequence
  Synthetic: FXN 5 forward 9:69036693-69036720; SpCas9
gataaagtcttcagaacttcaaat

SEQ ID NO: 51567 - DNA, 23 bp, Artificial Sequence
  Synthetic: FXN 5 forward 9:69036694-69036720; SpCas9
ataaagtcttcagaacttcaaat

SEQ ID NO: 51568 - DNA, 22 bp, Artificial Sequence
  Synthetic: FXN 5 forward 9:69036695-69036720; SpCas9
taaagtcttcagaacttcaaat

SEQ ID NO: 51569 - DNA, 21 bp, Artificial Sequence
  Synthetic: FXN 5 forward 9:69036696-69036720; SpCas9
aaagtcttcagaacttcaaat

SEQ ID NO: 51570 - DNA, 20 bp, Artificial Sequence
  Synthetic: FXN 5 forward 9:69036697-69036720; SpCas9
aagtcttcagaacttcaaat

SEQ ID NO: 51571 - DNA, 19 bp, Artificial Sequence
  Synthetic: FXN 5 forward 9:69036698-69036720; SpCas9
agtcttcagaacttcaaat

SEQ ID NO: 51572 - DNA, 18 bp, Artificial Sequence
  Synthetic: FXN 5 forward 9:69036699-69036720; SpCas9
gtcttcagaacttcaaat

SEQ ID NO: 51573 - DNA, 25 bp, Artificial Sequence
  Synthetic: FXN 5 reverse 9:69036701-69036729; SpCas9
aaaggggaactaatttgaagttctg

SEQ ID NO: 51574 - DNA, 24 bp, Artificial Sequence
  Synthetic: FXN 5 reverse 9:69036702-69036729; SpCas9
aaggggaactaatttgaagttctg

SEQ ID NO: 51575 - DNA, 23 bp, Artificial Sequence
  Synthetic: FXN 5 reverse 9:69036703-69036729; SpCas9
aggggaactaatttgaagttctg

SEQ ID NO: 51576 - DNA, 22 bp, Artificial Sequence
  Synthetic: FXN 5 reverse 9:69036704-69036729; SpCas9
ggggaactaatttgaagttctg

SEQ ID NO: 51577 - DNA, 21 bp, Artificial Sequence
  Synthetic: FXN 5 reverse 9:69036705-69036729; SpCas9
gggaactaatttgaagttctg

SEQ ID NO: 51578 - DNA, 20 bp, Artificial Sequence
  Synthetic: FXN 5 reverse 9:69036706-69036729; SpCas9
ggaactaatttgaagttctg

SEQ ID NO: 51579 - DNA, 19 bp, Artificial Sequence
  Synthetic: FXN 5 reverse 9:69036707-69036729; SpCas9
gaactaatttgaagttctg

SEQ ID NO: 51580 - DNA, 18 bp, Artificial Sequence
  Synthetic: FXN 5 reverse 9:69036708-69036729; SpCas9
aactaatttgaagttctg

SEQ ID NO: 51581 - DNA, 25 bp, Artificial Sequence
  Synthetic: FXN 5 reverse 9:69036709-69036737; SpCas9
aaaggaagaaaggggaactaatttg

SEQ ID NO: 51582 - DNA, 24 bp, Artificial Sequence
  Synthetic: FXN 5 reverse 9:69036710-69036737; SpCas9
aaggaagaaaggggaactaatttg

SEQ ID NO: 51583 - DNA, 23 bp, Artificial Sequence
  Synthetic: FXN 5 reverse 9:69036711-69036737; SpCas9
aggaagaaaggggaactaatttg

SEQ ID NO: 51584 - DNA, 22 bp, Artificial Sequence
  Synthetic: FXN 5 reverse 9:69036712-69036737; SpCas9
ggaagaaaggggaactaatttg

SEQ ID NO: 51585 - DNA, 21 bp, Artificial Sequence
  Synthetic: FXN 5 reverse 9:69036713-69036737; SpCas9
gaagaaaggggaactaatttg

SEQ ID NO: 51586 - DNA, 20 bp, Artificial Sequence
  Synthetic: FXN 5 reverse 9:69036714-69036737; SpCas9
aagaaaggggaactaatttg

SEQ ID NO: 51587 - DNA, 19 bp, Artificial Sequence
  Synthetic: FXN 5 reverse 9:69036715-69036737; SpCas9
agaaaggggaactaatttg

SEQ ID NO: 51588 - DNA, 18 bp, Artificial Sequence
  Synthetic: FXN 5 reverse 9:69036716-69036737; SpCas9
gaaaggggaactaatttg

SEQ ID NO: 51589 - DNA, 25 bp, Artificial Sequence
  Synthetic: FXN 5 forward 9:69036711-69036739; SpCas9
tcaaattagttcccctttcttcctt

SEQ ID NO: 51590 - DNA, 24 bp, Artificial Sequence
  Synthetic: FXN 5 forward 9:69036712-69036739; SpCas9
caaattagttcccctttcttcctt

SEQ ID NO: 51591 - DNA, 23 bp, Artificial Sequence
  Synthetic: FXN 5 forward 9:69036713-69036739; SpCas9
aaattagttcccctttcttcctt

SEQ ID NO: 51592 - DNA, 22 bp, Artificial Sequence
  Synthetic: FXN 5 forward 9:69036714-69036739; SpCas9
aattagttcccctttcttcctt

SEQ ID NO: 51593 - DNA, 21 bp, Artificial Sequence
  Synthetic: FXN 5 forward 9:69036715-69036739; SpCas9
attagttcccctttcttcctt

SEQ ID NO: 51594 - DNA, 20 bp, Artificial Sequence
  Synthetic: FXN 5 forward 9:69036716-69036739; SpCas9
ttagttcccctttcttcctt

SEQ ID NO: 51595 - DNA, 19 bp, Artificial Sequence
  Synthetic: FXN 5 forward 9:69036717-69036739; SpCas9
tagttcccctttcttcctt

SEQ ID NO: 51596 - DNA, 18 bp, Artificial Sequence
  Synthetic: FXN 5 forward 9:69036718-69036739; SpCas9
agttcccctttcttcctt

SEQ ID NO: 51597 - DNA, 25 bp, Artificial Sequence
  Synthetic: FXN 5 forward 9:69036712-69036740; SpCas9
caaattagttcccctttcttccttt

SEQ ID NO: 51598 - DNA, 24 bp, Artificial Sequence
  Synthetic: FXN 5 forward 9:69036713-69036740; SpCas9
aaattagttcccctttcttccttt

SEQ ID NO: 51599 - DNA, 23 bp, Artificial Sequence
  Synthetic: FXN 5 forward 9:69036714-69036740; SpCas9
aattagttcccctttcttccttt

SEQ ID NO: 51600 - DNA, 22 bp, Artificial Sequence
  Synthetic: FXN 5 forward 9:69036715-69036740; SpCas9
attagttcccctttcttccttt

SEQ ID NO: 51601 - DNA, 21 bp, Artificial Sequence
  Synthetic: FXN 5 forward 9:69036716-69036740; SpCas9
ttagttcccctttcttccttt

SEQ ID NO: 51602 - DNA, 20 bp, Artificial Sequence
  Synthetic: FXN 5 forward 9:69036717-69036740; SpCas9
tagttcccctttcttccttt

SEQ ID NO: 51603 - DNA, 19 bp, Artificial Sequence
  Synthetic: FXN 5 forward 9:69036718-69036740; SpCas9
agttcccctttcttccttt

SEQ ID NO: 51604 - DNA, 18 bp, Artificial Sequence
  Synthetic: FXN 5 forward 9:69036719-69036740; SpCas9
gttcccctttcttccttt

SEQ ID NO: 51605 - DNA, 25 bp, Artificial Sequence
  Synthetic: FXN 5 forward 9:69036713-69036741; SpCas9
aaattagttcccctttcttcctttg

SEQ ID NO: 51606 - DNA, 24 bp, Artificial Sequence
  Synthetic: FXN 5 forward 9:69036714-69036741; SpCas9
aattagttcccctttcttcctttg

SEQ ID NO: 51607 - DNA, 23 bp, Artificial Sequence
  Synthetic: FXN 5 forward 9:69036715-69036741; SpCas9
attagttcccctttcttcctttg

SEQ ID NO: 51608 - DNA, 22 bp, Artificial Sequence
  Synthetic: FXN 5 forward 9:69036716-69036741; SpCas9
ttagttcccctttcttcctttg

SEQ ID NO: 51609 - DNA, 21 bp, Artificial Sequence
  Synthetic: FXN 5 forward 9:69036717-69036741; SpCas9
tagttcccctttcttcctttg

SEQ ID NO: 51610 - DNA, 20 bp, Artificial Sequence
  Synthetic: FXN 5 forward 9:69036718-69036741; SpCas9
agttcccctttcttcctttg

SEQ ID NO: 51611 - DNA, 19 bp, Artificial Sequence
  Synthetic: FXN 5 forward 9:69036719-69036741; SpCas9
gttcccctttcttcctttg

SEQ ID NO: 51612 - DNA, 18 bp, Artificial Sequence
  Synthetic: FXN 5 forward 9:69036720-69036741; SpCas9
ttcccctttcttcctttg

SEQ ID NO: 51613 - DNA, 25 bp, Artificial Sequence
  Synthetic: FXN 5 forward 9:69036714-69036742; SpCas9
aattagttcccctttcttcctttgg

SEQ ID NO: 51614 - DNA, 24 bp, Artificial Sequence
  Synthetic: FXN 5 forward 9:69036715-69036742; SpCas9
attagttcccctttcttcctttgg

SEQ ID NO: 51615 - DNA, 23 bp, Artificial Sequence
  Synthetic: FXN 5 forward 9:69036716-69036742; SpCas9
ttagttcccctttcttcctttgg

SEQ ID NO: 51616 - DNA, 22 bp, Artificial Sequence
  Synthetic: FXN 5 forward 9:69036717-69036742; SpCas9
tagttcccctttcttcctttgg

SEQ ID NO: 51617 - DNA, 21 bp, Artificial Sequence
  Synthetic: FXN 5 forward 9:69036718-69036742; SpCas9
agttcccctttcttcctttgg

SEQ ID NO: 51618 - DNA, 20 bp, Artificial Sequence
  Synthetic: FXN 5 forward 9:69036719-69036742; SpCas9
gttcccctttcttcctttgg

SEQ ID NO: 51619 - DNA, 19 bp, Artificial Sequence
  Synthetic: FXN 5 forward 9:69036720-69036742; SpCas9
ttcccctttcttcctttgg

SEQ ID NO: 51620 - DNA, 18 bp, Artificial Sequence
  Synthetic: FXN 5 forward 9:69036721-69036742; SpCas9
tcccctttcttcctttgg

SEQ ID NO: 51621 - DNA, 25 bp, Artificial Sequence
  Synthetic: FXN 5 forward 9:69036715-69036743; SpCas9
attagttcccctttcttcctttggg

SEQ ID NO: 51622 - DNA, 24 bp, Artificial Sequence
  Synthetic: FXN 5 forward 9:69036716-69036743; SpCas9
ttagttcccctttcttcctttggg

SEQ ID NO: 51623 - DNA, 23 bp, Artificial Sequence
  Synthetic: FXN 5 forward 9:69036717-69036743; SpCas9
tagttcccctttcttcctttggg

SEQ ID NO: 51624 - DNA, 22 bp, Artificial Sequence
  Synthetic: FXN 5 forward 9:69036718-69036743; SpCas9
agttcccctttcttcctttggg

SEQ ID NO: 51625 - DNA, 21 bp, Artificial Sequence
  Synthetic: FXN 5 forward 9:69036719-69036743; SpCas9
gttcccctttcttcctttggg

SEQ ID NO: 51626 - DNA, 20 bp, Artificial Sequence
  Synthetic: FXN 5 forward 9:69036720-69036743; SpCas9
ttcccctttcttcctttggg

SEQ ID NO: 51627 - DNA, 19 bp, Artificial Sequence
  Synthetic: FXN 5 forward 9:69036721-69036743; SpCas9
tcccctttcttcctttggg

SEQ ID NO: 51628 - DNA, 18 bp, Artificial Sequence
  Synthetic: FXN 5 forward 9:69036722-69036743; SpCas9
cccctttcttcctttggg

SEQ ID NO: 51629 - DNA, 25 bp, Artificial Sequence
  Synthetic: FXN 5 forward 9:69036722-69036750; SpCas9
cccctttcttcctttggggggtaca

SEQ ID NO: 51630 - DNA, 24 bp, Artificial Sequence
  Synthetic: FXN 5 forward 9:69036723-69036750; SpCas9
ccctttcttcctttggggggtaca

SEQ ID NO: 51631 - DNA, 23 bp, Artificial Sequence
  Synthetic: FXN 5 forward 9:69036724-69036750; SpCas9
cctttcttcctttggggggtaca

SEQ ID NO: 51632 - DNA, 22 bp, Artificial Sequence
  Synthetic: FXN 5 forward 9:69036725-69036750; SpCas9
ctttcttcctttggggggtaca

SEQ ID NO: 51633 - DNA, 21 bp, Artificial Sequence
  Synthetic: FXN 5 forward 9:69036726-69036750; SpCas9
tttcttcctttggggggtaca

SEQ ID NO: 51634 - DNA, 20 bp, Artificial Sequence
  Synthetic: FXN 5 forward 9:69036727-69036750; SpCas9
ttcttcctttggggggtaca

SEQ ID NO: 51635 - DNA, 19 bp, Artificial Sequence
  Synthetic: FXN 5 forward 9:69036728-69036750; SpCas9
tcttcctttggggggtaca

SEQ ID NO: 51636 - DNA, 18 bp, Artificial Sequence
  Synthetic: FXN 5 forward 9:69036729-69036750; SpCas9
cttcctttggggggtaca

SEQ ID NO: 51637 - DNA, 25 bp, Artificial Sequence
  Synthetic: FXN 5 reverse 9:69036722-69036750; SpCas9
ctttgtaccccccaaaggaagaaag

SEQ ID NO: 51638 - DNA, 24 bp, Artificial Sequence
  Synthetic: FXN 5 reverse 9:69036723-69036750; SpCas9
tttgtaccccccaaaggaagaaag

SEQ ID NO: 51639 - DNA, 23 bp, Artificial Sequence
  Synthetic: FXN 5 reverse 9:69036724-69036750; SpCas9
ttgtaccccccaaaggaagaaag

SEQ ID NO: 51640 - DNA, 22 bp, Artificial Sequence
  Synthetic: FXN 5 reverse 9:69036725-69036750; SpCas9
tgtaccccccaaaggaagaaag

SEQ ID NO: 51641 - DNA, 21 bp, Artificial Sequence
  Synthetic: FXN 5 reverse 9:69036726-69036750; SpCas9
gtaccccccaaaggaagaaag

SEQ ID NO: 51642 - DNA, 20 bp, Artificial Sequence
  Synthetic: FXN 5 reverse 9:69036727-69036750; SpCas9
taccccccaaaggaagaaag

SEQ ID NO: 51643 - DNA, 19 bp, Artificial Sequence
  Synthetic: FXN 5 reverse 9:69036728-69036750; SpCas9
accccccaaaggaagaaag

SEQ ID NO: 51644 - DNA, 18 bp, Artificial Sequence
  Synthetic: FXN 5 reverse 9:69036729-69036750; SpCas9
ccccccaaaggaagaaag

SEQ ID NO: 51645 - DNA, 25 bp, Artificial Sequence
  Synthetic: FXN 5 reverse 9:69036723-69036751; SpCas9
tctttgtaccccccaaaggaagaaa

SEQ ID NO: 51646 - DNA, 24 bp, Artificial Sequence
  Synthetic: FXN 5 reverse 9:69036724-69036751; SpCas9
ctttgtaccccccaaaggaagaaa

SEQ ID NO: 51647 - DNA, 23 bp, Artificial Sequence
  Synthetic: FXN 5 reverse 9:69036725-69036751; SpCas9
tttgtaccccccaaaggaagaaa

SEQ ID NO: 51648 - DNA, 22 bp, Artificial Sequence
  Synthetic: FXN 5 reverse 9:69036726-69036751; SpCas9
ttgtaccccccaaaggaagaaa

SEQ ID NO: 51649 - DNA, 21 bp, Artificial Sequence
  Synthetic: FXN 5 reverse 9:69036727-69036751; SpCas9
tgtaccccccaaaggaagaaa

SEQ ID NO: 51650 - DNA, 20 bp, Artificial Sequence
  Synthetic: FXN 5 reverse 9:69036728-69036751; SpCas9
gtaccccccaaaggaagaaa

SEQ ID NO: 51651 - DNA, 19 bp, Artificial Sequence
  Synthetic: FXN 5 reverse 9:69036729-69036751; SpCas9
taccccccaaaggaagaaa

SEQ ID NO: 51652 - DNA, 18 bp, Artificial Sequence
  Synthetic: FXN 5 reverse 9:69036730-69036751; SpCas9
accccccaaaggaagaaa

SEQ ID NO: 51653 - DNA, 25 bp, Artificial Sequence
  Synthetic: FXN 5 reverse 9:69036724-69036752; SpCas9
ttctttgtaccccccaaaggaagaa

SEQ ID NO: 51654 - DNA, 24 bp, Artificial Sequence
  Synthetic: FXN 5 reverse 9:69036725-69036752; SpCas9
tctttgtaccccccaaaggaagaa

SEQ ID NO: 51655 - DNA, 23 bp, Artificial Sequence
  Synthetic: FXN 5 reverse 9:69036726-69036752; SpCas9
ctttgtaccccccaaaggaagaa

SEQ ID NO: 51656 - DNA, 22 bp, Artificial Sequence
  Synthetic: FXN 5 reverse 9:69036727-69036752; SpCas9
tttgtaccccccaaaggaagaa

SEQ ID NO: 51657 - DNA, 21 bp, Artificial Sequence
  Synthetic: FXN 5 reverse 9:69036728-69036752; SpCas9
ttgtaccccccaaaggaagaa

SEQ ID NO: 51658 - DNA, 20 bp, Artificial Sequence
  Synthetic: FXN 5 reverse 9:69036729-69036752; SpCas9
tgtaccccccaaaggaagaa

SEQ ID NO: 51659 - DNA, 19 bp, Artificial Sequence
  Synthetic: FXN 5 reverse 9:69036730-69036752; SpCas9
gtaccccccaaaggaagaa

SEQ ID NO: 51660 - DNA, 18 bp, Artificial Sequence
  Synthetic: FXN 5 reverse 9:69036731-69036752; SpCas9
taccccccaaaggaagaa

SEQ ID NO: 51661 - DNA, 25 bp, Artificial Sequence
  Synthetic: FXN 5 reverse 9:69036725-69036753; SpCas9
tttctttgtaccccccaaaggaaga

SEQ ID NO: 51662 - DNA, 24 bp, Artificial Sequence
  Synthetic: FXN 5 reverse 9:69036726-69036753; SpCas9
ttctttgtaccccccaaaggaaga

SEQ ID NO: 51663 - DNA, 23 bp, Artificial Sequence
  Synthetic: FXN 5 reverse 9:69036727-69036753; SpCas9
tctttgtaccccccaaaggaaga

SEQ ID NO: 51664 - DNA, 22 bp, Artificial Sequence
  Synthetic: FXN 5 reverse 9:69036728-69036753; SpCas9
ctttgtaccccccaaaggaaga

SEQ ID NO: 51665 - DNA, 21 bp, Artificial Sequence
  Synthetic: FXN 5 reverse 9:69036729-69036753; SpCas9
tttgtaccccccaaaggaaga

SEQ ID NO: 51666 - DNA, 20 bp, Artificial Sequence
  Synthetic: FXN 5 reverse 9:69036730-69036753; SpCas9
ttgtaccccccaaaggaaga

SEQ ID NO: 51667 - DNA, 19 bp, Artificial Sequence
  Synthetic: FXN 5 reverse 9:69036731-69036753; SpCas9
tgtaccccccaaaggaaga

SEQ ID NO: 51668 - DNA, 18 bp, Artificial Sequence
  Synthetic: FXN 5 reverse 9:69036732-69036753; SpCas9
gtaccccccaaaggaaga

SEQ ID NO: 51669 - DNA, 25 bp, Artificial Sequence
  Synthetic: FXN 5 reverse 9:69036729-69036757; SpCas9
gatatttctttgtaccccccaaagg

SEQ ID NO: 51670 - DNA, 24 bp, Artificial Sequence
  Synthetic: FXN 5 reverse 9:69036730-69036757; SpCas9
atatttctttgtaccccccaaagg

SEQ ID NO: 51671 - DNA, 23 bp, Artificial Sequence
  Synthetic: FXN 5 reverse 9:69036731-69036757; SpCas9
tatttctttgtaccccccaaagg

SEQ ID NO: 51672 - DNA, 22 bp, Artificial Sequence
  Synthetic: FXN 5 reverse 9:69036732-69036757; SpCas9
atttctttgtaccccccaaagg

SEQ ID NO: 51673 - DNA, 21 bp, Artificial Sequence
  Synthetic: FXN 5 reverse 9:69036733-69036757; SpCas9
tttctttgtaccccccaaagg

SEQ ID NO: 51674 - DNA, 20 bp, Artificial Sequence
  Synthetic: FXN 5 reverse 9:69036734-69036757; SpCas9
ttctttgtaccccccaaagg

SEQ ID NO: 51675 - DNA, 19 bp, Artificial Sequence
  Synthetic: FXN 5 reverse 9:69036735-69036757; SpCas9
tctttgtaccccccaaagg

SEQ ID NO: 51676 - DNA, 18 bp, Artificial Sequence
  Synthetic: FXN 5 reverse 9:69036736-69036757; SpCas9
ctttgtaccccccaaagg

SEQ ID NO: 51677 - DNA, 25 bp, Artificial Sequence
  Synthetic: FXN 5 reverse 9:69036732-69036760; SpCas9
tcagatatttctttgtaccccccaa

SEQ ID NO: 51678 - DNA, 24 bp, Artificial Sequence
  Synthetic: FXN 5 reverse 9:69036733-69036760; SpCas9
cagatatttctttgtaccccccaa

SEQ ID NO: 51679 - DNA, 23 bp, Artificial Sequence
  Synthetic: FXN 5 reverse 9:69036734-69036760; SpCas9
agatatttctttgtaccccccaa

SEQ ID NO: 51680 - DNA, 22 bp, Artificial Sequence
  Synthetic: FXN 5 reverse 9:69036735-69036760; SpCas9
gatatttctttgtaccccccaa

SEQ ID NO: 51681 - DNA, 21 bp, Artificial Sequence
  Synthetic: FXN 5 reverse 9:69036736-69036760; SpCas9
atatttctttgtaccccccaa

SEQ ID NO: 51682 - DNA, 20 bp, Artificial Sequence
  Synthetic: FXN 5 reverse 9:69036737-69036760; SpCas9
tatttctttgtaccccccaa

SEQ ID NO: 51683 - DNA, 19 bp, Artificial Sequence
  Synthetic: FXN 5 reverse 9:69036738-69036760; SpCas9
atttctttgtaccccccaa

SEQ ID NO: 51684 - DNA, 18 bp, Artificial Sequence
  Synthetic: FXN 5 reverse 9:69036739-69036760; SpCas9
tttctttgtaccccccaa

SEQ ID NO: 51685 - DNA, 25 bp, Artificial Sequence
  Synthetic: FXN 5 reverse 9:69036733-69036761; SpCas9
gtcagatatttctttgtacccccca

SEQ ID NO: 51686 - DNA, 24 bp, Artificial Sequence
  Synthetic: FXN 5 reverse 9:69036734-69036761; SpCas9
tcagatatttctttgtacccccca

SEQ ID NO: 51687 - DNA, 23 bp, Artificial Sequence
  Synthetic: FXN 5 reverse 9:69036735-69036761; SpCas9
cagatatttctttgtacccccca

SEQ ID NO: 51688 - DNA, 22 bp, Artificial Sequence
  Synthetic: FXN 5 reverse 9:69036736-69036761; SpCas9
agatatttctttgtacccccca

SEQ ID NO: 51689 - DNA, 21 bp, Artificial Sequence
  Synthetic: FXN 5 reverse 9:69036737-69036761; SpCas9
gatatttctttgtacccccca

SEQ ID NO: 51690 - DNA, 20 bp, Artificial Sequence
  Synthetic: FXN 5 reverse 9:69036738-69036761; SpCas9
atatttctttgtacccccca

SEQ ID NO: 51691 - DNA, 19 bp, Artificial Sequence
  Synthetic: FXN 5 reverse 9:69036739-69036761; SpCas9
tatttctttgtacccccca

SEQ ID NO: 51692 - DNA, 18 bp, Artificial Sequence
  Synthetic: FXN 5 reverse 9:69036740-69036761; SpCas9
atttctttgtacccccca

SEQ ID NO: 51693 - DNA, 25 bp, Artificial Sequence
  Synthetic: FXN 5 forward 9:69036737-69036765; SpCas9
ggggggtacaaagaaatatctgacc

SEQ ID NO: 51694 - DNA, 24 bp, Artificial Sequence
  Synthetic: FXN 5 forward 9:69036738-69036765; SpCas9
gggggtacaaagaaatatctgacc

SEQ ID NO: 51695 - DNA, 23 bp, Artificial Sequence
  Synthetic: FXN 5 forward 9:69036739-69036765; SpCas9
ggggtacaaagaaatatctgacc

SEQ ID NO: 51696 - DNA, 22 bp, Artificial Sequence
  Synthetic: FXN 5 forward 9:69036740-69036765; SpCas9
gggtacaaagaaatatctgacc

SEQ ID NO: 51697 - DNA, 21 bp, Artificial Sequence
  Synthetic: FXN 5 forward 9:69036741-69036765; SpCas9
ggtacaaagaaatatctgacc

SEQ ID NO: 51698 - DNA, 20 bp, Artificial Sequence
  Synthetic: FXN 5 forward 9:69036742-69036765; SpCas9
gtacaaagaaatatctgacc

SEQ ID NO: 51699 - DNA, 19 bp, Artificial Sequence
  Synthetic: FXN 5 forward 9:69036743-69036765; SpCas9
tacaaagaaatatctgacc

SEQ ID NO: 51700 - DNA, 18 bp, Artificial Sequence
  Synthetic: FXN 5 forward 9:69036744-69036765; SpCas9
acaaagaaatatctgacc

SEQ ID NO: 51701 - DNA, 25 bp, Artificial Sequence
  Synthetic: FXN 5 forward 9:69036748-69036776; SpCas9
agaaatatctgacccagttacgcca

SEQ ID NO: 51702 - DNA, 24 bp, Artificial Sequence
  Synthetic: FXN 5 forward 9:69036749-69036776; SpCas9
gaaatatctgacccagttacgcca

SEQ ID NO: 51703 - DNA, 23 bp, Artificial Sequence
  Synthetic: FXN 5 forward 9:69036750-69036776; SpCas9
aaatatctgacccagttacgcca

SEQ ID NO: 51704 - DNA, 22 bp, Artificial Sequence
  Synthetic: FXN 5 forward 9:69036751-69036776; SpCas9
aatatctgacccagttacgcca

SEQ ID NO: 51705 - DNA, 21 bp, Artificial Sequence
  Synthetic: FXN 5 forward 9:69036752-69036776; SpCas9
atatctgacccagttacgcca

SEQ ID NO: 51706 - DNA, 20 bp, Artificial Sequence
  Synthetic: FXN 5 forward 9:69036753-69036776; SpCas9
tatctgacccagttacgcca

SEQ ID NO: 51707 - DNA, 19 bp, Artificial Sequence
  Synthetic: FXN 5 forward 9:69036754-69036776; SpCas9
atctgacccagttacgcca

SEQ ID NO: 51708 - DNA, 18 bp, Artificial Sequence
  Synthetic: FXN 5 forward 9:69036755-69036776; SpCas9
tctgacccagttacgcca

SEQ ID NO: 51709 - DNA, 25 bp, Artificial Sequence
  Synthetic: FXN 5 forward 9:69036756-69036784; SpCas9
ctgacccagttacgccacggcttga

SEQ ID NO: 51710 - DNA, 24 bp, Artificial Sequence
  Synthetic: FXN 5 forward 9:69036757-69036784; SpCas9
tgacccagttacgccacggcttga

SEQ ID NO: 51711 - DNA, 23 bp, Artificial Sequence
  Synthetic: FXN 5 forward 9:69036758-69036784; SpCas9
gacccagttacgccacggcttga

SEQ ID NO: 51712 - DNA, 22 bp, Artificial Sequence
  Synthetic: FXN 5 forward 9:69036759-69036784; SpCas9
acccagttacgccacggcttga

SEQ ID NO: 51713 - DNA, 21 bp, Artificial Sequence
  Synthetic: FXN 5 forward 9:69036760-69036784; SpCas9
cccagttacgccacggcttga

SEQ ID NO: 51714 - DNA, 20 bp, Artificial Sequence
  Synthetic: FXN 5 forward 9:69036761-69036784; SpCas9
ccagttacgccacggcttga

SEQ ID NO: 51715 - DNA, 19 bp, Artificial Sequence
  Synthetic: FXN 5 forward 9:69036762-69036784; SpCas9
cagttacgccacggcttga

SEQ ID NO: 51716 - DNA, 18 bp, Artificial Sequence
  Synthetic: FXN 5 forward 9:69036763-69036784; SpCas9
agttacgccacggcttga

SEQ ID NO: 51717 - DNA, 25 bp, Artificial Sequence
  Synthetic: FXN 5 reverse 9:69036756-69036784; SpCas9
ctttcaagccgtggcgtaactgggt

SEQ ID NO: 51718 - DNA, 24 bp, Artificial Sequence
  Synthetic: FXN 5 reverse 9:69036757-69036784; SpCas9
tttcaagccgtggcgtaactgggt

SEQ ID NO: 51719 - DNA, 23 bp, Artificial Sequence
  Synthetic: FXN 5 reverse 9:69036758-69036784; SpCas9
ttcaagccgtggcgtaactgggt

SEQ ID NO: 51720 - DNA, 22 bp, Artificial Sequence
  Synthetic: FXN 5 reverse 9:69036759-69036784; SpCas9
tcaagccgtggcgtaactgggt

SEQ ID NO: 51721 - DNA, 21 bp, Artificial Sequence
  Synthetic: FXN 5 reverse 9:69036760-69036784; SpCas9
caagccgtggcgtaactgggt

SEQ ID NO: 51722 - DNA, 20 bp, Artificial Sequence
  Synthetic: FXN 5 reverse 9:69036761-69036784; SpCas9
aagccgtggcgtaactgggt

SEQ ID NO: 51723 - DNA, 19 bp, Artificial Sequence
  Synthetic: FXN 5 reverse 9:69036762-69036784; SpCas9
agccgtggcgtaactgggt

SEQ ID NO: 51724 - DNA, 18 bp, Artificial Sequence
  Synthetic: FXN 5 reverse 9:69036763-69036784; SpCas9
gccgtggcgtaactgggt

SEQ ID NO: 51725 - DNA, 25 bp, Artificial Sequence
  Synthetic: FXN 5 forward 9:69036757-69036785; SpCas9
tgacccagttacgccacggcttgaa

SEQ ID NO: 51726 - DNA, 24 bp, Artificial Sequence
  Synthetic: FXN 5 forward 9:69036758-69036785; SpCas9
gacccagttacgccacggcttgaa

SEQ ID NO: 51727 - DNA, 23 bp, Artificial Sequence
  Synthetic: FXN 5 forward 9:69036759-69036785; SpCas9
acccagttacgccacggcttgaa

SEQ ID NO: 51728 - DNA, 22 bp, Artificial Sequence
  Synthetic: FXN 5 forward 9:69036760-69036785; SpCas9
cccagttacgccacggcttgaa

SEQ ID NO: 51729 - DNA, 21 bp, Artificial Sequence
  Synthetic: FXN 5 forward 9:69036761-69036785; SpCas9
ccagttacgccacggcttgaa

SEQ ID NO: 51730 - DNA, 20 bp, Artificial Sequence
  Synthetic: FXN 5 forward 9:69036762-69036785; SpCas9
cagttacgccacggcttgaa

SEQ ID NO: 51731 - DNA, 19 bp, Artificial Sequence
  Synthetic: FXN 5 forward 9:69036763-69036785; SpCas9
agttacgccacggcttgaa

SEQ ID NO: 51732 - DNA, 18 bp, Artificial Sequence
  Synthetic: FXN 5 forward 9:69036764-69036785; SpCas9
gttacgccacggcttgaa

SEQ ID NO: 51733 - DNA, 25 bp, Artificial Sequence
  Synthetic: FXN 5 forward 9:69036759-69036787; SpCas9
acccagttacgccacggcttgaaag

SEQ ID NO: 51734 - DNA, 24 bp, Artificial Sequence
  Synthetic: FXN 5 forward 9:69036760-69036787; SpCas9
cccagttacgccacggcttgaaag

SEQ ID NO: 51735 - DNA, 23 bp, Artificial Sequence
  Synthetic: FXN 5 forward 9:69036761-69036787; SpCas9
ccagttacgccacggcttgaaag

SEQ ID NO: 51736 - DNA, 22 bp, Artificial Sequence
  Synthetic: FXN 5 forward 9:69036762-69036787; SpCas9
cagttacgccacggcttgaaag

SEQ ID NO: 51737 - DNA, 21 bp, Artificial Sequence
  Synthetic: FXN 5 forward 9:69036763-69036787; SpCas9
agttacgccacggcttgaaag

SEQ ID NO: 51738 - DNA, 20 bp, Artificial Sequence
  Synthetic: FXN 5 forward 9:69036764-69036787; SpCas9
gttacgccacggcttgaaag

SEQ ID NO: 51739 - DNA, 19 bp, Artificial Sequence
  Synthetic: FXN 5 forward 9:69036765-69036787; SpCas9
ttacgccacggcttgaaag

SEQ ID NO: 51740 - DNA, 18 bp, Artificial Sequence
  Synthetic: FXN 5 forward 9:69036766-69036787; SpCas9
tacgccacggcttgaaag

SEQ ID NO: 51741 - DNA, 25 bp, Artificial Sequence
  Synthetic: FXN 5 forward 9:69036760-69036788; SpCas9
cccagttacgccacggcttgaaagg

SEQ ID NO: 51742 - DNA, 24 bp, Artificial Sequence
  Synthetic: FXN 5 forward 9:69036761-69036788; SpCas9
ccagttacgccacggcttgaaagg

SEQ ID NO: 51743 - DNA, 23 bp, Artificial Sequence
  Synthetic: FXN 5 forward 9:69036762-69036788; SpCas9
cagttacgccacggcttgaaagg

SEQ ID NO: 51744 - DNA, 22 bp, Artificial Sequence
  Synthetic: FXN 5 forward 9:69036763-69036788; SpCas9
agttacgccacggcttgaaagg

SEQ ID NO: 51745 - DNA, 21 bp, Artificial Sequence
  Synthetic: FXN 5 forward 9:69036764-69036788; SpCas9
gttacgccacggcttgaaagg

SEQ ID NO: 51746 - DNA, 20 bp, Artificial Sequence
  Synthetic: FXN 5 forward 9:69036765-69036788; SpCas9
ttacgccacggcttgaaagg

SEQ ID NO: 51747 - DNA, 19 bp, Artificial Sequence
  Synthetic: FXN 5 forward 9:69036766-69036788; SpCas9
tacgccacggcttgaaagg

SEQ ID NO: 51748 - DNA, 18 bp, Artificial Sequence
  Synthetic: FXN 5 forward 9:69036767-69036788; SpCas9
acgccacggcttgaaagg

SEQ ID NO: 51749 - DNA, 25 bp, Artificial Sequence
  Synthetic: FXN 5 reverse 9:69036760-69036788; SpCas9
cctcctttcaagccgtggcgtaact

SEQ ID NO: 51750 - DNA, 24 bp, Artificial Sequence
  Synthetic: FXN 5 reverse 9:69036761-69036788; SpCas9
ctcctttcaagccgtggcgtaact

SEQ ID NO: 51751 - DNA, 23 bp, Artificial Sequence
  Synthetic: FXN 5 reverse 9:69036762-69036788; SpCas9
tcctttcaagccgtggcgtaact

SEQ ID NO: 51752 - DNA, 22 bp, Artificial Sequence
  Synthetic: FXN 5 reverse 9:69036763-69036788; SpCas9
cctttcaagccgtggcgtaact

SEQ ID NO: 51753 - DNA, 21 bp, Artificial Sequence
  Synthetic: FXN 5 reverse 9:69036764-69036788; SpCas9
ctttcaagccgtggcgtaact

SEQ ID NO: 51754 - DNA, 20 bp, Artificial Sequence
  Synthetic: FXN 5 reverse 9:69036765-69036788; SpCas9
tttcaagccgtggcgtaact

SEQ ID NO: 51755 - DNA, 19 bp, Artificial Sequence
  Synthetic: FXN 5 reverse 9:69036766-69036788; SpCas9
ttcaagccgtggcgtaact

SEQ ID NO: 51756 - DNA, 18 bp, Artificial Sequence
  Synthetic: FXN 5 reverse 9:69036767-69036788; SpCas9
tcaagccgtggcgtaact

SEQ ID NO: 51757 - DNA, 25 bp, Artificial Sequence
  Synthetic: FXN 5 reverse 9:69036761-69036789; SpCas9
tcctcctttcaagccgtggcgtaac

SEQ ID NO: 51758 - DNA, 24 bp, Artificial Sequence
  Synthetic: FXN 5 reverse 9:69036762-69036789; SpCas9
cctcctttcaagccgtggcgtaac

SEQ ID NO: 51759 - DNA, 23 bp, Artificial Sequence
  Synthetic: FXN 5 reverse 9:69036763-69036789; SpCas9
ctcctttcaagccgtggcgtaac

SEQ ID NO: 51760 - DNA, 22 bp, Artificial Sequence
  Synthetic: FXN 5 reverse 9:69036764-69036789; SpCas9
tcctttcaagccgtggcgtaac

SEQ ID NO: 51761 - DNA, 21 bp, Artificial Sequence
  Synthetic: FXN 5 reverse 9:69036765-69036789; SpCas9
cctttcaagccgtggcgtaac

SEQ ID NO: 51762 - DNA, 20 bp, Artificial Sequence
  Synthetic: FXN 5 reverse 9:69036766-69036789; SpCas9
ctttcaagccgtggcgtaac

SEQ ID NO: 51763 - DNA, 19 bp, Artificial Sequence
  Synthetic: FXN 5 reverse 9:69036767-69036789; SpCas9
tttcaagccgtggcgtaac

SEQ ID NO: 51764 - DNA, 18 bp, Artificial Sequence
  Synthetic: FXN 5 reverse 9:69036768-69036789; SpCas9
ttcaagccgtggcgtaac

SEQ ID NO: 51765 - DNA, 25 bp, Artificial Sequence
  Synthetic: FXN 5 forward 9:69036770-69036798; SpCas9
ccacggcttgaaaggaggaaaccca

SEQ ID NO: 51766 - DNA, 24 bp, Artificial Sequence
  Synthetic: FXN 5 forward 9:69036771-69036798; SpCas9
cacggcttgaaaggaggaaaccca

SEQ ID NO: 51767 - DNA, 23 bp, Artificial Sequence
  Synthetic: FXN 5 forward 9:69036772-69036798; SpCas9
acggcttgaaaggaggaaaccca

SEQ ID NO: 51768 - DNA, 22 bp, Artificial Sequence
  Synthetic: FXN 5 forward 9:69036773-69036798; SpCas9
cggcttgaaaggaggaaaccca

SEQ ID NO: 51769 - DNA, 21 bp, Artificial Sequence
  Synthetic: FXN 5 forward 9:69036774-69036798; SpCas9
ggcttgaaaggaggaaaccca

SEQ ID NO: 51770 - DNA, 20 bp, Artificial Sequence
  Synthetic: FXN 5 forward 9:69036775-69036798; SpCas9
gcttgaaaggaggaaaccca

SEQ ID NO: 51771 - DNA, 19 bp, Artificial Sequence
  Synthetic: FXN 5 forward 9:69036776-69036798; SpCas9
cttgaaaggaggaaaccca

SEQ ID NO: 51772 - DNA, 18 bp, Artificial Sequence
  Synthetic: FXN 5 forward 9:69036777-69036798; SpCas9
ttgaaaggaggaaaccca

SEQ ID NO: 51773 - DNA, 25 bp, Artificial Sequence
  Synthetic: FXN 5 reverse 9:69036770-69036798; SpCas9
ctttgggtttcctcctttcaagccg

SEQ ID NO: 51774 - DNA, 24 bp, Artificial Sequence
  Synthetic: FXN 5 reverse 9:69036771-69036798; SpCas9
tttgggtttcctcctttcaagccg

SEQ ID NO: 51775 - DNA, 23 bp, Artificial Sequence
  Synthetic: FXN 5 reverse 9:69036772-69036798; SpCas9
ttgggtttcctcctttcaagccg

SEQ ID NO: 51776 - DNA, 22 bp, Artificial Sequence
  Synthetic: FXN 5 reverse 9:69036773-69036798; SpCas9
tgggtttcctcctttcaagccg

SEQ ID NO: 51777 - DNA, 21 bp, Artificial Sequence
  Synthetic: FXN 5 reverse 9:69036774-69036798; SpCas9
gggtttcctcctttcaagccg

SEQ ID NO: 51778 - DNA, 20 bp, Artificial Sequence
  Synthetic: FXN 5 reverse 9:69036775-69036798; SpCas9
ggtttcctcctttcaagccg

SEQ ID NO: 51779 - DNA, 19 bp, Artificial Sequence
  Synthetic: FXN 5 reverse 9:69036776-69036798; SpCas9
gtttcctcctttcaagccg

SEQ ID NO: 51780 - DNA, 18 bp, Artificial Sequence
  Synthetic: FXN 5 reverse 9:69036777-69036798; SpCas9
tttcctcctttcaagccg

SEQ ID NO: 51781 - DNA, 25 bp, Artificial Sequence
  Synthetic: FXN 5 forward 9:69036775-69036803; SpCas9
gcttgaaaggaggaaacccaaagaa

SEQ ID NO: 51782 - DNA, 24 bp, Artificial Sequence
  Synthetic: FXN 5 forward 9:69036776-69036803; SpCas9
cttgaaaggaggaaacccaaagaa

SEQ ID NO: 51783 - DNA, 23 bp, Artificial Sequence
  Synthetic: FXN 5 forward 9:69036777-69036803; SpCas9
ttgaaaggaggaaacccaaagaa

SEQ ID NO: 51784 - DNA, 22 bp, Artificial Sequence
  Synthetic: FXN 5 forward 9:69036778-69036803; SpCas9
tgaaaggaggaaacccaaagaa

SEQ ID NO: 51785 - DNA, 21 bp, Artificial Sequence
  Synthetic: FXN 5 forward 9:69036779-69036803; SpCas9
gaaaggaggaaacccaaagaa

SEQ ID NO: 51786 - DNA, 20 bp, Artificial Sequence
  Synthetic: FXN 5 forward 9:69036780-69036803; SpCas9
aaaggaggaaacccaaagaa

SEQ ID NO: 51787 - DNA, 19 bp, Artificial Sequence
  Synthetic: FXN 5 forward 9:69036781-69036803; SpCas9
aaggaggaaacccaaagaa

SEQ ID NO: 51788 - DNA, 18 bp, Artificial Sequence
  Synthetic: FXN 5 forward 9:69036782-69036803; SpCas9
aggaggaaacccaaagaa

SEQ ID NO: 51789 - DNA, 25 bp, Artificial Sequence
  Synthetic: FXN 5 reverse 9:69036776-69036804; SpCas9
gccattctttgggtttcctcctttc

SEQ ID NO: 51790 - DNA, 24 bp, Artificial Sequence
  Synthetic: FXN 5 reverse 9:69036777-69036804; SpCas9
ccattctttgggtttcctcctttc

SEQ ID NO: 51791 - DNA, 23 bp, Artificial Sequence
  Synthetic: FXN 5 reverse 9:69036778-69036804; SpCas9
cattctttgggtttcctcctttc

SEQ ID NO: 51792 - DNA, 22 bp, Artificial Sequence
  Synthetic: FXN 5 reverse 9:69036779-69036804; SpCas9
attctttgggtttcctcctttc

SEQ ID NO: 51793 - DNA, 21 bp, Artificial Sequence
  Synthetic: FXN 5 reverse 9:69036780-69036804; SpCas9
ttctttgggtttcctcctttc

SEQ ID NO: 51794 - DNA, 20 bp, Artificial Sequence
  Synthetic: FXN 5 reverse 9:69036781-69036804; SpCas9
tctttgggtttcctcctttc

SEQ ID NO: 51795 - DNA, 19 bp, Artificial Sequence
  Synthetic: FXN 5 reverse 9:69036782-69036804; SpCas9
ctttgggtttcctcctttc

SEQ ID NO: 51796 - DNA, 18 bp, Artificial Sequence
  Synthetic: FXN 5 reverse 9:69036783-69036804; SpCas9
tttgggtttcctcctttc

SEQ ID NO: 51797 - DNA, 25 bp, Artificial Sequence
  Synthetic: FXN 5 forward 9:69036781-69036809; SpCas9
aaggaggaaacccaaagaatggctg

SEQ ID NO: 51798 - DNA, 24 bp, Artificial Sequence
  Synthetic: FXN 5 forward 9:69036782-69036809; SpCas9
aggaggaaacccaaagaatggctg

SEQ ID NO: 51799 - DNA, 23 bp, Artificial Sequence
  Synthetic: FXN 5 forward 9:69036783-69036809; SpCas9
ggaggaaacccaaagaatggctg

SEQ ID NO: 51800 - DNA, 22 bp, Artificial Sequence
  Synthetic: FXN 5 forward 9:69036784-69036809; SpCas9
gaggaaacccaaagaatggctg

SEQ ID NO: 51801 - DNA, 21 bp, Artificial Sequence
  Synthetic: FXN 5 forward 9:69036785-69036809; SpCas9
aggaaacccaaagaatggctg

SEQ ID NO: 51802 - DNA, 20 bp, Artificial Sequence
  Synthetic: FXN 5 forward 9:69036786-69036809; SpCas9
ggaaacccaaagaatggctg

SEQ ID NO: 51803 - DNA, 19 bp, Artificial Sequence
  Synthetic: FXN 5 forward 9:69036787-69036809; SpCas9
gaaacccaaagaatggctg

SEQ ID NO: 51804 - DNA, 18 bp, Artificial Sequence
  Synthetic: FXN 5 forward 9:69036788-69036809; SpCas9
aaacccaaagaatggctg

SEQ ID NO: 51805 - DNA, 25 bp, Artificial Sequence
  Synthetic: FXN 5 forward 9:69036782-69036810; SpCas9
aggaggaaacccaaagaatggctgt

SEQ ID NO: 51806 - DNA, 24 bp, Artificial Sequence
  Synthetic: FXN 5 forward 9:69036783-69036810; SpCas9
ggaggaaacccaaagaatggctgt

SEQ ID NO: 51807 - DNA, 23 bp, Artificial Sequence
  Synthetic: FXN 5 forward 9:69036784-69036810; SpCas9
gaggaaacccaaagaatggctgt

SEQ ID NO: 51808 - DNA, 22 bp, Artificial Sequence
  Synthetic: FXN 5 forward 9:69036785-69036810; SpCas9
aggaaacccaaagaatggctgt

SEQ ID NO: 51809 - DNA, 21 bp, Artificial Sequence
  Synthetic: FXN 5 forward 9:69036786-69036810; SpCas9
ggaaacccaaagaatggctgt

SEQ ID NO: 51810 - DNA, 20 bp, Artificial Sequence
  Synthetic: FXN 5 forward 9:69036787-69036810; SpCas9
gaaacccaaagaatggctgt

SEQ ID NO: 51811 - DNA, 19 bp, Artificial Sequence
  Synthetic: FXN 5 forward 9:69036788-69036810; SpCas9
aaacccaaagaatggctgt

SEQ ID NO: 51812 - DNA, 18 bp, Artificial Sequence
  Synthetic: FXN 5 forward 9:69036789-69036810; SpCas9
aacccaaagaatggctgt

SEQ ID NO: 51813 - DNA, 25 bp, Artificial Sequence
  Synthetic: FXN 5 forward 9:69036783-69036811; SpCas9
ggaggaaacccaaagaatggctgtg

SEQ ID NO: 51814 - DNA, 24 bp, Artificial Sequence
  Synthetic: FXN 5 forward 9:69036784-69036811; SpCas9
gaggaaacccaaagaatggctgtg

SEQ ID NO: 51815 - DNA, 23 bp, Artificial Sequence
  Synthetic: FXN 5 forward 9:69036785-69036811; SpCas9
aggaaacccaaagaatggctgtg

SEQ ID NO: 51816 - DNA, 22 bp, Artificial Sequence
  Synthetic: FXN 5 forward 9:69036786-69036811; SpCas9
ggaaacccaaagaatggctgtg

SEQ ID NO: 51817 - DNA, 21 bp, Artificial Sequence
  Synthetic: FXN 5 forward 9:69036787-69036811; SpCas9
gaaacccaaagaatggctgtg

SEQ ID NO: 51818 - DNA, 20 bp, Artificial Sequence
  Synthetic: FXN 5 forward 9:69036788-69036811; SpCas9
aaacccaaagaatggctgtg

SEQ ID NO: 51819 - DNA, 19 bp, Artificial Sequence
  Synthetic: FXN 5 forward 9:69036789-69036811; SpCas9
aacccaaagaatggctgtg

SEQ ID NO: 51820 - DNA, 18 bp, Artificial Sequence
  Synthetic: FXN 5 forward 9:69036790-69036811; SpCas9
acccaaagaatggctgtg

SEQ ID NO: 51821 - DNA, 25 bp, Artificial Sequence
  Synthetic: FXN 5 forward 9:69036788-69036816; SpCas9
aaacccaaagaatggctgtggggat

SEQ ID NO: 51822 - DNA, 24 bp, Artificial Sequence
  Synthetic: FXN 5 forward 9:69036789-69036816; SpCas9
aacccaaagaatggctgtggggat

SEQ ID NO: 51823 - DNA, 23 bp, Artificial Sequence
  Synthetic: FXN 5 forward 9:69036790-69036816; SpCas9
acccaaagaatggctgtggggat

SEQ ID NO: 51824 - DNA, 22 bp, Artificial Sequence
  Synthetic: FXN 5 forward 9:69036791-69036816; SpCas9
cccaaagaatggctgtggggat

SEQ ID NO: 51825 - DNA, 21 bp, Artificial Sequence
  Synthetic: FXN 5 forward 9:69036792-69036816; SpCas9
ccaaagaatggctgtggggat

SEQ ID NO: 51826 - DNA, 20 bp, Artificial Sequence
  Synthetic: FXN 5 forward 9:69036793-69036816; SpCas9
caaagaatggctgtggggat

SEQ ID NO: 51827 - DNA, 19 bp, Artificial Sequence
  Synthetic: FXN 5 forward 9:69036794-69036816; SpCas9
aaagaatggctgtggggat

SEQ ID NO: 51828 - DNA, 18 bp, Artificial Sequence
  Synthetic: FXN 5 forward 9:69036795-69036816; SpCas9
aagaatggctgtggggat

SEQ ID NO: 51829 - DNA, 25 bp, Artificial Sequence
  Synthetic: FXN 5 forward 9:69036789-69036817; SpCas9
aacccaaagaatggctgtggggatg

SEQ ID NO: 51830 - DNA, 24 bp, Artificial Sequence
  Synthetic: FXN 5 forward 9:69036790-69036817; SpCas9
acccaaagaatggctgtggggatg

SEQ ID NO: 51831 - DNA, 23 bp, Artificial Sequence
  Synthetic: FXN 5 forward 9:69036791-69036817; SpCas9
cccaaagaatggctgtggggatg

SEQ ID NO: 51832 - DNA, 22 bp, Artificial Sequence
  Synthetic: FXN 5 forward 9:69036792-69036817; SpCas9
ccaaagaatggctgtggggatg

SEQ ID NO: 51833 - DNA, 21 bp, Artificial Sequence
  Synthetic: FXN 5 forward 9:69036793-69036817; SpCas9
caaagaatggctgtggggatg

SEQ ID NO: 51834 - DNA, 20 bp, Artificial Sequence
  Synthetic: FXN 5 forward 9:69036794-69036817; SpCas9
aaagaatggctgtggggatg

SEQ ID NO: 51835 - DNA, 19 bp, Artificial Sequence
  Synthetic: FXN 5 forward 9:69036795-69036817; SpCas9
aagaatggctgtggggatg

SEQ ID NO: 51836 - DNA, 18 bp, Artificial Sequence
  Synthetic: FXN 5 forward 9:69036796-69036817; SpCas9
agaatggctgtggggatg

SEQ ID NO: 51837 - DNA, 25 bp, Artificial Sequence
  Synthetic: FXN 5 reverse 9:69036791-69036819; SpCas9
ttcctcatccccacagccattcttt

SEQ ID NO: 51838 - DNA, 24 bp, Artificial Sequence
  Synthetic: FXN 5 reverse 9:69036792-69036819; SpCas9
tcctcatccccacagccattcttt

SEQ ID NO: 51839 - DNA, 23 bp, Artificial Sequence
  Synthetic: FXN 5 reverse 9:69036793-69036819; SpCas9
cctcatccccacagccattcttt

SEQ ID NO: 51840 - DNA, 22 bp, Artificial Sequence
  Synthetic: FXN 5 reverse 9:69036794-69036819; SpCas9
ctcatccccacagccattcttt

SEQ ID NO: 51841 - DNA, 21 bp, Artificial Sequence
  Synthetic: FXN 5 reverse 9:69036795-69036819; SpCas9
tcatccccacagccattcttt

SEQ ID NO: 51842 - DNA, 20 bp, Artificial Sequence
  Synthetic: FXN 5 reverse 9:69036796-69036819; SpCas9
catccccacagccattcttt

SEQ ID NO: 51843 - DNA, 19 bp, Artificial Sequence
  Synthetic: FXN 5 reverse 9:69036797-69036819; SpCas9
atccccacagccattcttt

SEQ ID NO: 51844 - DNA, 18 bp, Artificial Sequence
  Synthetic: FXN 5 reverse 9:69036798-69036819; SpCas9
tccccacagccattcttt

SEQ ID NO: 51845 - DNA, 25 bp, Artificial Sequence
  Synthetic: FXN 5 forward 9:69036792-69036820; SpCas9
ccaaagaatggctgtggggatgagg

SEQ ID NO: 51846 - DNA, 24 bp, Artificial Sequence
  Synthetic: FXN 5 forward 9:69036793-69036820; SpCas9
caaagaatggctgtggggatgagg

SEQ ID NO: 51847 - DNA, 23 bp, Artificial Sequence
  Synthetic: FXN 5 forward 9:69036794-69036820; SpCas9
aaagaatggctgtggggatgagg

SEQ ID NO: 51848 - DNA, 22 bp, Artificial Sequence
  Synthetic: FXN 5 forward 9:69036795-69036820; SpCas9
aagaatggctgtggggatgagg

SEQ ID NO: 51849 - DNA, 21 bp, Artificial Sequence
  Synthetic: FXN 5 forward 9:69036796-69036820; SpCas9
agaatggctgtggggatgagg

SEQ ID NO: 51850 - DNA, 20 bp, Artificial Sequence
  Synthetic: FXN 5 forward 9:69036797-69036820; SpCas9
gaatggctgtggggatgagg

SEQ ID NO: 51851 - DNA, 19 bp, Artificial Sequence
  Synthetic: FXN 5 forward 9:69036798-69036820; SpCas9
aatggctgtggggatgagg

SEQ ID NO: 51852 - DNA, 18 bp, Artificial Sequence
  Synthetic: FXN 5 forward 9:69036799-69036820; SpCas9
atggctgtggggatgagg

SEQ ID NO: 51853 - DNA, 25 bp, Artificial Sequence
  Synthetic: FXN 5 reverse 9:69036792-69036820; SpCas9
cttcctcatccccacagccattctt

SEQ ID NO: 51854 - DNA, 24 bp, Artificial Sequence
  Synthetic: FXN 5 reverse 9:69036793-69036820; SpCas9
ttcctcatccccacagccattctt

SEQ ID NO: 51855 - DNA, 23 bp, Artificial Sequence
  Synthetic: FXN 5 reverse 9:69036794-69036820; SpCas9
tcctcatccccacagccattctt

SEQ ID NO: 51856 - DNA, 22 bp, Artificial Sequence
  Synthetic: FXN 5 reverse 9:69036795-69036820; SpCas9
cctcatccccacagccattctt

SEQ ID NO: 51857 - DNA, 21 bp, Artificial Sequence
  Synthetic: FXN 5 reverse 9:69036796-69036820; SpCas9
ctcatccccacagccattctt

SEQ ID NO: 51858 - DNA, 20 bp, Artificial Sequence
  Synthetic: FXN 5 reverse 9:69036797-69036820; SpCas9
tcatccccacagccattctt

SEQ ID NO: 51859 - DNA, 19 bp, Artificial Sequence
  Synthetic: FXN 5 reverse 9:69036798-69036820; SpCas9
catccccacagccattctt

SEQ ID NO: 51860 - DNA, 18 bp, Artificial Sequence
  Synthetic: FXN 5 reverse 9:69036799-69036820; SpCas9
atccccacagccattctt

SEQ ID NO: 51861 - DNA, 25 bp, Artificial Sequence
  Synthetic: FXN 5 forward 9:69036802-69036830; SpCas9
gctgtggggatgaggaagattcctc

SEQ ID NO: 51862 - DNA, 24 bp, Artificial Sequence
  Synthetic: FXN 5 forward 9:69036803-69036830; SpCas9
ctgtggggatgaggaagattcctc

SEQ ID NO: 51863 - DNA, 23 bp, Artificial Sequence
  Synthetic: FXN 5 forward 9:69036804-69036830; SpCas9
tgtggggatgaggaagattcctc

SEQ ID NO: 51864 - DNA, 22 bp, Artificial Sequence
  Synthetic: FXN 5 forward 9:69036805-69036830; SpCas9
gtggggatgaggaagattcctc

SEQ ID NO: 51865 - DNA, 21 bp, Artificial Sequence
  Synthetic: FXN 5 forward 9:69036806-69036830; SpCas9
tggggatgaggaagattcctc

SEQ ID NO: 51866 - DNA, 20 bp, Artificial Sequence
  Synthetic: FXN 5 forward 9:69036807-69036830; SpCas9
ggggatgaggaagattcctc

SEQ ID NO: 51867 - DNA, 19 bp, Artificial Sequence
  Synthetic: FXN 5 forward 9:69036808-69036830; SpCas9
gggatgaggaagattcctc

SEQ ID NO: 51868 - DNA, 18 bp, Artificial Sequence
  Synthetic: FXN 5 forward 9:69036809-69036830; SpCas9
ggatgaggaagattcctc

SEQ ID NO: 51869 - DNA, 25 bp, Artificial Sequence
  Synthetic: FXN 5 forward 9:69036803-69036831; SpCas9
ctgtggggatgaggaagattcctca

SEQ ID NO: 51870 - DNA, 24 bp, Artificial Sequence
  Synthetic: FXN 5 forward 9:69036804-69036831; SpCas9
tgtggggatgaggaagattcctca

SEQ ID NO: 51871 - DNA, 23 bp, Artificial Sequence
  Synthetic: FXN 5 forward 9:69036805-69036831; SpCas9
gtggggatgaggaagattcctca

SEQ ID NO: 51872 - DNA, 22 bp, Artificial Sequence
  Synthetic: FXN 5 forward 9:69036806-69036831; SpCas9
tggggatgaggaagattcctca

SEQ ID NO: 51873 - DNA, 21 bp, Artificial Sequence
  Synthetic: FXN 5 forward 9:69036807-69036831; SpCas9
ggggatgaggaagattcctca

SEQ ID NO: 51874 - DNA, 20 bp, Artificial Sequence
  Synthetic: FXN 5 forward 9:69036808-69036831; SpCas9
gggatgaggaagattcctca

SEQ ID NO: 51875 - DNA, 19 bp, Artificial Sequence
  Synthetic: FXN 5 forward 9:69036809-69036831; SpCas9
ggatgaggaagattcctca

SEQ ID NO: 51876 - DNA, 18 bp, Artificial Sequence
  Synthetic: FXN 5 forward 9:69036810-69036831; SpCas9
gatgaggaagattcctca

SEQ ID NO: 51877 - DNA, 25 bp, Artificial Sequence
  Synthetic: FXN 5 reverse 9:69036803-69036831; SpCas9
ccttgaggaatcttcctcatcccca

SEQ ID NO: 51878 - DNA, 24 bp, Artificial Sequence
  Synthetic: FXN 5 reverse 9:69036804-69036831; SpCas9
cttgaggaatcttcctcatcccca

SEQ ID NO: 51879 - DNA, 23 bp, Artificial Sequence
  Synthetic: FXN 5 reverse 9:69036805-69036831; SpCas9
ttgaggaatcttcctcatcccca

SEQ ID NO: 51880 - DNA, 22 bp, Artificial Sequence
  Synthetic: FXN 5 reverse 9:69036806-69036831; SpCas9
tgaggaatcttcctcatcccca

SEQ ID NO: 51881 - DNA, 21 bp, Artificial Sequence
  Synthetic: FXN 5 reverse 9:69036807-69036831; SpCas9
gaggaatcttcctcatcccca

SEQ ID NO: 51882 - DNA, 20 bp, Artificial Sequence
  Synthetic: FXN 5 reverse 9:69036808-69036831; SpCas9
aggaatcttcctcatcccca

SEQ ID NO: 51883 - DNA, 19 bp, Artificial Sequence
  Synthetic: FXN 5 reverse 9:69036809-69036831; SpCas9
ggaatcttcctcatcccca

SEQ ID NO: 51884 - DNA, 18 bp, Artificial Sequence
  Synthetic: FXN 5 reverse 9:69036810-69036831; SpCas9
gaatcttcctcatcccca

SEQ ID NO: 51885 - DNA, 25 bp, Artificial Sequence
  Synthetic: FXN 5 forward 9:69036804-69036832; SpCas9
tgtggggatgaggaagattcctcaa

SEQ ID NO: 51886 - DNA, 24 bp, Artificial Sequence
  Synthetic: FXN 5 forward 9:69036805-69036832; SpCas9
gtggggatgaggaagattcctcaa

SEQ ID NO: 51887 - DNA, 23 bp, Artificial Sequence
  Synthetic: FXN 5 forward 9:69036806-69036832; SpCas9
tggggatgaggaagattcctcaa

SEQ ID NO: 51888 - DNA, 22 bp, Artificial Sequence
  Synthetic: FXN 5 forward 9:69036807-69036832; SpCas9
ggggatgaggaagattcctcaa

SEQ ID NO: 51889 - DNA, 21 bp, Artificial Sequence
  Synthetic: FXN 5 forward 9:69036808-69036832; SpCas9
gggatgaggaagattcctcaa

SEQ ID NO: 51890 - DNA, 20 bp, Artificial Sequence
  Synthetic: FXN 5 forward 9:69036809-69036832; SpCas9
ggatgaggaagattcctcaa

SEQ ID NO: 51891 - DNA, 19 bp, Artificial Sequence
  Synthetic: FXN 5 forward 9:69036810-69036832; SpCas9
gatgaggaagattcctcaa

SEQ ID NO: 51892 - DNA, 18 bp, Artificial Sequence
  Synthetic: FXN 5 forward 9:69036811-69036832; SpCas9
atgaggaagattcctcaa

SEQ ID NO: 51893 - DNA, 25 bp, Artificial Sequence
  Synthetic: FXN 5 forward 9:69036805-69036833; SpCas9
gtggggatgaggaagattcctcaag

SEQ ID NO: 51894 - DNA, 24 bp, Artificial Sequence
  Synthetic: FXN 5 forward 9:69036806-69036833; SpCas9
tggggatgaggaagattcctcaag

SEQ ID NO: 51895 - DNA, 23 bp, Artificial Sequence
  Synthetic: FXN 5 forward 9:69036807-69036833; SpCas9
ggggatgaggaagattcctcaag

SEQ ID NO: 51896 - DNA, 22 bp, Artificial Sequence
  Synthetic: FXN 5 forward 9:69036808-69036833; SpCas9
gggatgaggaagattcctcaag

SEQ ID NO: 51897 - DNA, 21 bp, Artificial Sequence
  Synthetic: FXN 5 forward 9:69036809-69036833; SpCas9
ggatgaggaagattcctcaag

SEQ ID NO: 51898 - DNA, 20 bp, Artificial Sequence
  Synthetic: FXN 5 forward 9:69036810-69036833; SpCas9
gatgaggaagattcctcaag

SEQ ID NO: 51899 - DNA, 19 bp, Artificial Sequence
  Synthetic: FXN 5 forward 9:69036811-69036833; SpCas9
atgaggaagattcctcaag

SEQ ID NO: 51900 - DNA, 18 bp, Artificial Sequence
  Synthetic: FXN 5 forward 9:69036812-69036833; SpCas9
tgaggaagattcctcaag

SEQ ID NO: 51901 - DNA, 25 bp, Artificial Sequence
  Synthetic: FXN 5 forward 9:69036807-69036835; SpCas9
ggggatgaggaagattcctcaaggg

SEQ ID NO: 51902 - DNA, 24 bp, Artificial Sequence
  Synthetic: FXN 5 forward 9:69036808-69036835; SpCas9
gggatgaggaagattcctcaaggg

SEQ ID NO: 51903 - DNA, 23 bp, Artificial Sequence
  Synthetic: FXN 5 forward 9:69036809-69036835; SpCas9
ggatgaggaagattcctcaaggg

SEQ ID NO: 51904 - DNA, 22 bp, Artificial Sequence
  Synthetic: FXN 5 forward 9:69036810-69036835; SpCas9
gatgaggaagattcctcaaggg

SEQ ID NO: 51905 - DNA, 21 bp, Artificial Sequence
  Synthetic: FXN 5 forward 9:69036811-69036835; SpCas9
atgaggaagattcctcaaggg

SEQ ID NO: 51906 - DNA, 20 bp, Artificial Sequence
  Synthetic: FXN 5 forward 9:69036812-69036835; SpCas9
tgaggaagattcctcaaggg

SEQ ID NO: 51907 - DNA, 19 bp, Artificial Sequence
  Synthetic: FXN 5 forward 9:69036813-69036835; SpCas9
gaggaagattcctcaaggg

SEQ ID NO: 51908 - DNA, 18 bp, Artificial Sequence
  Synthetic: FXN 5 forward 9:69036814-69036835; SpCas9
aggaagattcctcaaggg

SEQ ID NO: 51909 - DNA, 25 bp, Artificial Sequence
  Synthetic: FXN 5 forward 9:69036808-69036836; SpCas9
gggatgaggaagattcctcaagggg

SEQ ID NO: 51910 - DNA, 24 bp, Artificial Sequence
  Synthetic: FXN 5 forward 9:69036809-69036836; SpCas9
ggatgaggaagattcctcaagggg

SEQ ID NO: 51911 - DNA, 23 bp, Artificial Sequence
  Synthetic: FXN 5 forward 9:69036810-69036836; SpCas9
gatgaggaagattcctcaagggg

SEQ ID NO: 51912 - DNA, 22 bp, Artificial Sequence
  Synthetic: FXN 5 forward 9:69036811-69036836; SpCas9
atgaggaagattcctcaagggg

SEQ ID NO: 51913 - DNA, 21 bp, Artificial Sequence
  Synthetic: FXN 5 forward 9:69036812-69036836; SpCas9
tgaggaagattcctcaagggg

SEQ ID NO: 51914 - DNA, 20 bp, Artificial Sequence
  Synthetic: FXN 5 forward 9:69036813-69036836; SpCas9
gaggaagattcctcaagggg

SEQ ID NO: 51915 - DNA, 19 bp, Artificial Sequence
  Synthetic: FXN 5 forward 9:69036814-69036836; SpCas9
aggaagattcctcaagggg

SEQ ID NO: 51916 - DNA, 18 bp, Artificial Sequence
  Synthetic: FXN 5 forward 9:69036815-69036836; SpCas9
ggaagattcctcaagggg

SEQ ID NO: 51917 - DNA, 25 bp, Artificial Sequence
  Synthetic: FXN 5 forward 9:69036814-69036842; SpCas9
aggaagattcctcaaggggaggaca

SEQ ID NO: 51918 - DNA, 24 bp, Artificial Sequence
  Synthetic: FXN 5 forward 9:69036815-69036842; SpCas9
ggaagattcctcaaggggaggaca

SEQ ID NO: 51919 - DNA, 23 bp, Artificial Sequence
  Synthetic: FXN 5 forward 9:69036816-69036842; SpCas9
gaagattcctcaaggggaggaca

SEQ ID NO: 51920 - DNA, 22 bp, Artificial Sequence
  Synthetic: FXN 5 forward 9:69036817-69036842; SpCas9
aagattcctcaaggggaggaca

SEQ ID NO: 51921 - DNA, 21 bp, Artificial Sequence
  Synthetic: FXN 5 forward 9:69036818-69036842; SpCas9
agattcctcaaggggaggaca

SEQ ID NO: 51922 - DNA, 20 bp, Artificial Sequence
  Synthetic: FXN 5 forward 9:69036819-69036842; SpCas9
gattcctcaaggggaggaca

SEQ ID NO: 51923 - DNA, 19 bp, Artificial Sequence
  Synthetic: FXN 5 forward 9:69036820-69036842; SpCas9
attcctcaaggggaggaca

SEQ ID NO: 51924 - DNA, 18 bp, Artificial Sequence
  Synthetic: FXN 5 forward 9:69036821-69036842; SpCas9
ttcctcaaggggaggaca

SEQ ID NO: 51925 - DNA, 25 bp, Artificial Sequence
  Synthetic: FXN 5 reverse 9:69036823-69036851; SpCas9
cattaaataccatgtcctccccttg

SEQ ID NO: 51926 - DNA, 24 bp, Artificial Sequence
  Synthetic: FXN 5 reverse 9:69036824-69036851; SpCas9
attaaataccatgtcctccccttg

SEQ ID NO: 51927 - DNA, 23 bp, Artificial Sequence
  Synthetic: FXN 5 reverse 9:69036825-69036851; SpCas9
ttaaataccatgtcctccccttg

SEQ ID NO: 51928 - DNA, 22 bp, Artificial Sequence
  Synthetic: FXN 5 reverse 9:69036826-69036851; SpCas9
taaataccatgtcctccccttg

SEQ ID NO: 51929 - DNA, 21 bp, Artificial Sequence
  Synthetic: FXN 5 reverse 9:69036827-69036851; SpCas9
aaataccatgtcctccccttg

SEQ ID NO: 51930 - DNA, 20 bp, Artificial Sequence
  Synthetic: FXN 5 reverse 9:69036828-69036851; SpCas9
aataccatgtcctccccttg

SEQ ID NO: 51931 - DNA, 19 bp, Artificial Sequence
  Synthetic: FXN 5 reverse 9:69036829-69036851; SpCas9
ataccatgtcctccccttg

SEQ ID NO: 51932 - DNA, 18 bp, Artificial Sequence
  Synthetic: FXN 5 reverse 9:69036830-69036851; SpCas9
taccatgtcctccccttg

SEQ ID NO: 51933 - DNA, 25 bp, Artificial Sequence
  Synthetic: FXN 5 reverse 9:69036824-69036852; SpCas9
tcattaaataccatgtcctcccctt

SEQ ID NO: 51934 - DNA, 24 bp, Artificial Sequence
  Synthetic: FXN 5 reverse 9:69036825-69036852; SpCas9
cattaaataccatgtcctcccctt

SEQ ID NO: 51935 - DNA, 23 bp, Artificial Sequence
  Synthetic: FXN 5 reverse 9:69036826-69036852; SpCas9
attaaataccatgtcctcccctt

SEQ ID NO: 51936 - DNA, 22 bp, Artificial Sequence
  Synthetic: FXN 5 reverse 9:69036827-69036852; SpCas9
ttaaataccatgtcctcccctt

SEQ ID NO: 51937 - DNA, 21 bp, Artificial Sequence
  Synthetic: FXN 5 reverse 9:69036828-69036852; SpCas9
taaataccatgtcctcccctt

SEQ ID NO: 51938 - DNA, 20 bp, Artificial Sequence
  Synthetic: FXN 5 reverse 9:69036829-69036852; SpCas9
aaataccatgtcctcccctt

SEQ ID NO: 51939 - DNA, 19 bp, Artificial Sequence
  Synthetic: FXN 5 reverse 9:69036830-69036852; SpCas9
aataccatgtcctcccctt

SEQ ID NO: 51940 - DNA, 18 bp, Artificial Sequence
  Synthetic: FXN 5 reverse 9:69036831-69036852; SpCas9
ataccatgtcctcccctt

SEQ ID NO: 51941 - DNA, 25 bp, Artificial Sequence
  Synthetic: FXN 5 forward 9:69036825-69036853; SpCas9
tcaaggggaggacatggtatttaat

SEQ ID NO: 51942 - DNA, 24 bp, Artificial Sequence
  Synthetic: FXN 5 forward 9:69036826-69036853; SpCas9
caaggggaggacatggtatttaat

SEQ ID NO: 51943 - DNA, 23 bp, Artificial Sequence
  Synthetic: FXN 5 forward 9:69036827-69036853; SpCas9
aaggggaggacatggtatttaat

SEQ ID NO: 51944 - DNA, 22 bp, Artificial Sequence
  Synthetic: FXN 5 forward 9:69036828-69036853; SpCas9
aggggaggacatggtatttaat

SEQ ID NO: 51945 - DNA, 21 bp, Artificial Sequence
  Synthetic: FXN 5 forward 9:69036829-69036853; SpCas9
ggggaggacatggtatttaat

SEQ ID NO: 51946 - DNA, 20 bp, Artificial Sequence
  Synthetic: FXN 5 forward 9:69036830-69036853; SpCas9
gggaggacatggtatttaat

SEQ ID NO: 51947 - DNA, 19 bp, Artificial Sequence
  Synthetic: FXN 5 forward 9:69036831-69036853; SpCas9
ggaggacatggtatttaat

SEQ ID NO: 51948 - DNA, 18 bp, Artificial Sequence
  Synthetic: FXN 5 forward 9:69036832-69036853; SpCas9
gaggacatggtatttaat

SEQ ID NO: 51949 - DNA, 25 bp, Artificial Sequence
  Synthetic: FXN 5 forward 9:69036826-69036854; SpCas9
caaggggaggacatggtatttaatg

SEQ ID NO: 51950 - DNA, 24 bp, Artificial Sequence
  Synthetic: FXN 5 forward 9:69036827-69036854; SpCas9
aaggggaggacatggtatttaatg

SEQ ID NO: 51951 - DNA, 23 bp, Artificial Sequence
  Synthetic: FXN 5 forward 9:69036828-69036854; SpCas9
aggggaggacatggtatttaatg

SEQ ID NO: 51952 - DNA, 22 bp, Artificial Sequence
  Synthetic: FXN 5 forward 9:69036829-69036854; SpCas9
ggggaggacatggtatttaatg

SEQ ID NO: 51953 - DNA, 21 bp, Artificial Sequence
  Synthetic: FXN 5 forward 9:69036830-69036854; SpCas9
gggaggacatggtatttaatg

SEQ ID NO: 51954 - DNA, 20 bp, Artificial Sequence
  Synthetic: FXN 5 forward 9:69036831-69036854; SpCas9
ggaggacatggtatttaatg

SEQ ID NO: 51955 - DNA, 19 bp, Artificial Sequence
  Synthetic: FXN 5 forward 9:69036832-69036854; SpCas9
gaggacatggtatttaatg

SEQ ID NO: 51956 - DNA, 18 bp, Artificial Sequence
  Synthetic: FXN 5 forward 9:69036833-69036854; SpCas9
aggacatggtatttaatg

SEQ ID NO: 51957 - DNA, 25 bp, Artificial Sequence
  Synthetic: FXN 5 forward 9:69036827-69036855; SpCas9
aaggggaggacatggtatttaatga

SEQ ID NO: 51958 - DNA, 24 bp, Artificial Sequence
  Synthetic: FXN 5 forward 9:69036828-69036855; SpCas9
aggggaggacatggtatttaatga

SEQ ID NO: 51959 - DNA, 23 bp, Artificial Sequence
  Synthetic: FXN 5 forward 9:69036829-69036855; SpCas9
ggggaggacatggtatttaatga

SEQ ID NO: 51960 - DNA, 22 bp, Artificial Sequence
  Synthetic: FXN 5 forward 9:69036830-69036855; SpCas9
gggaggacatggtatttaatga

SEQ ID NO: 51961 - DNA, 21 bp, Artificial Sequence
  Synthetic: FXN 5 forward 9:69036831-69036855; SpCas9
ggaggacatggtatttaatga

SEQ ID NO: 51962 - DNA, 20 bp, Artificial Sequence
  Synthetic: FXN 5 forward 9:69036832-69036855; SpCas9
gaggacatggtatttaatga

SEQ ID NO: 51963 - DNA, 19 bp, Artificial Sequence
  Synthetic: FXN 5 forward 9:69036833-69036855; SpCas9
aggacatggtatttaatga

SEQ ID NO: 51964 - DNA, 18 bp, Artificial Sequence
  Synthetic: FXN 5 forward 9:69036834-69036855; SpCas9
ggacatggtatttaatga

SEQ ID NO: 51965 - DNA, 25 bp, Artificial Sequence
  Synthetic: FXN 5 forward 9:69036835-69036863; SpCas9
gacatggtatttaatgagggtcttg

SEQ ID NO: 51966 - DNA, 24 bp, Artificial Sequence
  Synthetic: FXN 5 forward 9:69036836-69036863; SpCas9
acatggtatttaatgagggtcttg

SEQ ID NO: 51967 - DNA, 23 bp, Artificial Sequence
  Synthetic: FXN 5 forward 9:69036837-69036863; SpCas9
catggtatttaatgagggtcttg

SEQ ID NO: 51968 - DNA, 22 bp, Artificial Sequence
  Synthetic: FXN 5 forward 9:69036838-69036863; SpCas9
atggtatttaatgagggtcttg

SEQ ID NO: 51969 - DNA, 21 bp, Artificial Sequence
  Synthetic: FXN 5 forward 9:69036839-69036863; SpCas9
tggtatttaatgagggtcttg

SEQ ID NO: 51970 - DNA, 20 bp, Artificial Sequence
  Synthetic: FXN 5 forward 9:69036840-69036863; SpCas9
ggtatttaatgagggtcttg

SEQ ID NO: 51971 - DNA, 19 bp, Artificial Sequence
  Synthetic: FXN 5 forward 9:69036841-69036863; SpCas9
gtatttaatgagggtcttg

SEQ ID NO: 51972 - DNA, 18 bp, Artificial Sequence
  Synthetic: FXN 5 forward 9:69036842-69036863; SpCas9
tatttaatgagggtcttg

SEQ ID NO: 51973 - DNA, 25 bp, Artificial Sequence
  Synthetic: FXN 5 forward 9:69036843-69036871; SpCas9
atttaatgagggtcttgaagatgcc

SEQ ID NO: 51974 - DNA, 24 bp, Artificial Sequence
  Synthetic: FXN 5 forward 9:69036844-69036871; SpCas9
tttaatgagggtcttgaagatgcc

SEQ ID NO: 51975 - DNA, 23 bp, Artificial Sequence
  Synthetic: FXN 5 forward 9:69036845-69036871; SpCas9
ttaatgagggtcttgaagatgcc

SEQ ID NO: 51976 - DNA, 22 bp, Artificial Sequence
  Synthetic: FXN 5 forward 9:69036846-69036871; SpCas9
taatgagggtcttgaagatgcc

SEQ ID NO: 51977 - DNA, 21 bp, Artificial Sequence
  Synthetic: FXN 5 forward 9:69036847-69036871; SpCas9
aatgagggtcttgaagatgcc

SEQ ID NO: 51978 - DNA, 20 bp, Artificial Sequence
  Synthetic: FXN 5 forward 9:69036848-69036871; SpCas9
atgagggtcttgaagatgcc

SEQ ID NO: 51979 - DNA, 19 bp, Artificial Sequence
  Synthetic: FXN 5 forward 9:69036849-69036871; SpCas9
tgagggtcttgaagatgcc

SEQ ID NO: 51980 - DNA, 18 bp, Artificial Sequence
  Synthetic: FXN 5 forward 9:69036850-69036871; SpCas9
gagggtcttgaagatgcc

SEQ ID NO: 51981 - DNA, 25 bp, Artificial Sequence
  Synthetic: FXN 5 forward 9:69036844-69036872; SpCas9
tttaatgagggtcttgaagatgcca

SEQ ID NO: 51982 - DNA, 24 bp, Artificial Sequence
  Synthetic: FXN 5 forward 9:69036845-69036872; SpCas9
ttaatgagggtcttgaagatgcca

SEQ ID NO: 51983 - DNA, 23 bp, Artificial Sequence
  Synthetic: FXN 5 forward 9:69036846-69036872; SpCas9
taatgagggtcttgaagatgcca

SEQ ID NO: 51984 - DNA, 22 bp, Artificial Sequence
  Synthetic: FXN 5 forward 9:69036847-69036872; SpCas9
aatgagggtcttgaagatgcca

SEQ ID NO: 51985 - DNA, 21 bp, Artificial Sequence
  Synthetic: FXN 5 forward 9:69036848-69036872; SpCas9
atgagggtcttgaagatgcca

SEQ ID NO: 51986 - DNA, 20 bp, Artificial Sequence
  Synthetic: FXN 5 forward 9:69036849-69036872; SpCas9
tgagggtcttgaagatgcca

SEQ ID NO: 51987 - DNA, 19 bp, Artificial Sequence
  Synthetic: FXN 5 forward 9:69036850-69036872; SpCas9
gagggtcttgaagatgcca

SEQ ID NO: 51988 - DNA, 18 bp, Artificial Sequence
  Synthetic: FXN 5 forward 9:69036851-69036872; SpCas9
agggtcttgaagatgcca

SEQ ID NO: 51989 - DNA, 25 bp, Artificial Sequence
  Synthetic: FXN 5 forward 9:69036847-69036875; SpCas9
aatgagggtcttgaagatgccaagg

SEQ ID NO: 51990 - DNA, 24 bp, Artificial Sequence
  Synthetic: FXN 5 forward 9:69036848-69036875; SpCas9
atgagggtcttgaagatgccaagg

SEQ ID NO: 51991 - DNA, 23 bp, Artificial Sequence
  Synthetic: FXN 5 forward 9:69036849-69036875; SpCas9
tgagggtcttgaagatgccaagg

SEQ ID NO: 51992 - DNA, 22 bp, Artificial Sequence
  Synthetic: FXN 5 forward 9:69036850-69036875; SpCas9
gagggtcttgaagatgccaagg

SEQ ID NO: 51993 - DNA, 21 bp, Artificial Sequence
  Synthetic: FXN 5 forward 9:69036851-69036875; SpCas9
agggtcttgaagatgccaagg

SEQ ID NO: 51994 - DNA, 20 bp, Artificial Sequence
  Synthetic: FXN 5 forward 9:69036852-69036875; SpCas9
gggtcttgaagatgccaagg

SEQ ID NO: 51995 - DNA, 19 bp, Artificial Sequence
  Synthetic: FXN 5 forward 9:69036853-69036875; SpCas9
ggtcttgaagatgccaagg

SEQ ID NO: 51996 - DNA, 18 bp, Artificial Sequence
  Synthetic: FXN 5 forward 9:69036854-69036875; SpCas9
gtcttgaagatgccaagg

SEQ ID NO: 51997 - DNA, 25 bp, Artificial Sequence
  Synthetic: FXN 5 forward 9:69036850-69036878; SpCas9
gagggtcttgaagatgccaaggaag

SEQ ID NO: 51998 - DNA, 24 bp, Artificial Sequence
  Synthetic: FXN 5 forward 9:69036851-69036878; SpCas9
agggtcttgaagatgccaaggaag

SEQ ID NO: 51999 - DNA, 23 bp, Artificial Sequence
  Synthetic: FXN 5 forward 9:69036852-69036878; SpCas9
gggtcttgaagatgccaaggaag

SEQ ID NO: 52000 - DNA, 22 bp, Artificial Sequence
  Synthetic: FXN 5 forward 9:69036853-69036878; SpCas9
ggtcttgaagatgccaaggaag

SEQ ID NO: 52001 - DNA, 21 bp, Artificial Sequence
  Synthetic: FXN 5 forward 9:69036854-69036878; SpCas9
gtcttgaagatgccaaggaag

SEQ ID NO: 52002 - DNA, 20 bp, Artificial Sequence
  Synthetic: FXN 5 forward 9:69036855-69036878; SpCas9
tcttgaagatgccaaggaag

SEQ ID NO: 52003 - DNA, 19 bp, Artificial Sequence
  Synthetic: FXN 5 forward 9:69036856-69036878; SpCas9
cttgaagatgccaaggaag

SEQ ID NO: 52004 - DNA, 18 bp, Artificial Sequence
  Synthetic: FXN 5 forward 9:69036857-69036878; SpCas9
ttgaagatgccaaggaag

SEQ ID NO: 52005 - DNA, 25 bp, Artificial Sequence
  Synthetic: FXN 5 forward 9:69036853-69036881; SpCas9
ggtcttgaagatgccaaggaagtgg

SEQ ID NO: 52006 - DNA, 24 bp, Artificial Sequence
  Synthetic: FXN 5 forward 9:69036854-69036881; SpCas9
gtcttgaagatgccaaggaagtgg

SEQ ID NO: 52007 - DNA, 23 bp, Artificial Sequence
  Synthetic: FXN 5 forward 9:69036855-69036881; SpCas9
tcttgaagatgccaaggaagtgg

SEQ ID NO: 52008 - DNA, 22 bp, Artificial Sequence
  Synthetic: FXN 5 forward 9:69036856-69036881; SpCas9
cttgaagatgccaaggaagtgg

SEQ ID NO: 52009 - DNA, 21 bp, Artificial Sequence
  Synthetic: FXN 5 forward 9:69036857-69036881; SpCas9
ttgaagatgccaaggaagtgg

SEQ ID NO: 52010 - DNA, 20 bp, Artificial Sequence
  Synthetic: FXN 5 forward 9:69036858-69036881; SpCas9
tgaagatgccaaggaagtgg

SEQ ID NO: 52011 - DNA, 19 bp, Artificial Sequence
  Synthetic: FXN 5 forward 9:69036859-69036881; SpCas9
gaagatgccaaggaagtgg

SEQ ID NO: 52012 - DNA, 18 bp, Artificial Sequence
  Synthetic: FXN 5 forward 9:69036860-69036881; SpCas9
aagatgccaaggaagtgg

SEQ ID NO: 52013 - DNA, 25 bp, Artificial Sequence
  Synthetic: FXN 5 forward 9:69036855-69036883; SpCas9
tcttgaagatgccaaggaagtggta

SEQ ID NO: 52014 - DNA, 24 bp, Artificial Sequence
  Synthetic: FXN 5 forward 9:69036856-69036883; SpCas9
cttgaagatgccaaggaagtggta

SEQ ID NO: 52015 - DNA, 23 bp, Artificial Sequence
  Synthetic: FXN 5 forward 9:69036857-69036883; SpCas9
ttgaagatgccaaggaagtggta

SEQ ID NO: 52016 - DNA, 22 bp, Artificial Sequence
  Synthetic: FXN 5 forward 9:69036858-69036883; SpCas9
tgaagatgccaaggaagtggta

SEQ ID NO: 52017 - DNA, 21 bp, Artificial Sequence
  Synthetic: FXN 5 forward 9:69036859-69036883; SpCas9
gaagatgccaaggaagtggta

SEQ ID NO: 52018 - DNA, 20 bp, Artificial Sequence
  Synthetic: FXN 5 forward 9:69036860-69036883; SpCas9
aagatgccaaggaagtggta

SEQ ID NO: 52019 - DNA, 19 bp, Artificial Sequence
  Synthetic: FXN 5 forward 9:69036861-69036883; SpCas9
agatgccaaggaagtggta

SEQ ID NO: 52020 - DNA, 18 bp, Artificial Sequence
  Synthetic: FXN 5 forward 9:69036862-69036883; SpCas9
gatgccaaggaagtggta

SEQ ID NO: 52021 - DNA, 25 bp, Artificial Sequence
  Synthetic: FXN 5 forward 9:69036856-69036884; SpCas9
cttgaagatgccaaggaagtggtag

SEQ ID NO: 52022 - DNA, 24 bp, Artificial Sequence
  Synthetic: FXN 5 forward 9:69036857-69036884; SpCas9
ttgaagatgccaaggaagtggtag

SEQ ID NO: 52023 - DNA, 23 bp, Artificial Sequence
  Synthetic: FXN 5 forward 9:69036858-69036884; SpCas9
tgaagatgccaaggaagtggtag

SEQ ID NO: 52024 - DNA, 22 bp, Artificial Sequence
  Synthetic: FXN 5 forward 9:69036859-69036884; SpCas9
gaagatgccaaggaagtggtag

SEQ ID NO: 52025 - DNA, 21 bp, Artificial Sequence
  Synthetic: FXN 5 forward 9:69036860-69036884; SpCas9
aagatgccaaggaagtggtag

SEQ ID NO: 52026 - DNA, 20 bp, Artificial Sequence
  Synthetic: FXN 5 forward 9:69036861-69036884; SpCas9
agatgccaaggaagtggtag

SEQ ID NO: 52027 - DNA, 19 bp, Artificial Sequence
  Synthetic: FXN 5 forward 9:69036862-69036884; SpCas9
gatgccaaggaagtggtag

SEQ ID NO: 52028 - DNA, 18 bp, Artificial Sequence
  Synthetic: FXN 5 forward 9:69036863-69036884; SpCas9
atgccaaggaagtggtag

SEQ ID NO: 52029 - DNA, 25 bp, Artificial Sequence
  Synthetic: FXN 5 reverse 9:69036856-69036884; SpCas9
cctctaccacttccttggcatcttc

SEQ ID NO: 52030 - DNA, 24 bp, Artificial Sequence
  Synthetic: FXN 5 reverse 9:69036857-69036884; SpCas9
ctctaccacttccttggcatcttc

SEQ ID NO: 52031 - DNA, 23 bp, Artificial Sequence
  Synthetic: FXN 5 reverse 9:69036858-69036884; SpCas9
tctaccacttccttggcatcttc

SEQ ID NO: 52032 - DNA, 22 bp, Artificial Sequence
  Synthetic: FXN 5 reverse 9:69036859-69036884; SpCas9
ctaccacttccttggcatcttc

SEQ ID NO: 52033 - DNA, 21 bp, Artificial Sequence
  Synthetic: FXN 5 reverse 9:69036860-69036884; SpCas9
taccacttccttggcatcttc

SEQ ID NO: 52034 - DNA, 20 bp, Artificial Sequence
  Synthetic: FXN 5 reverse 9:69036861-69036884; SpCas9
accacttccttggcatcttc

SEQ ID NO: 52035 - DNA, 19 bp, Artificial Sequence
  Synthetic: FXN 5 reverse 9:69036862-69036884; SpCas9
ccacttccttggcatcttc

SEQ ID NO: 52036 - DNA, 18 bp, Artificial Sequence
  Synthetic: FXN 5 reverse 9:69036863-69036884; SpCas9
cacttccttggcatcttc

SEQ ID NO: 52037 - DNA, 25 bp, Artificial Sequence
  Synthetic: FXN 5 forward 9:69036857-69036885; SpCas9
ttgaagatgccaaggaagtggtaga

SEQ ID NO: 52038 - DNA, 24 bp, Artificial Sequence
  Synthetic: FXN 5 forward 9:69036858-69036885; SpCas9
tgaagatgccaaggaagtggtaga

SEQ ID NO: 52039 - DNA, 23 bp, Artificial Sequence
  Synthetic: FXN 5 forward 9:69036859-69036885; SpCas9
gaagatgccaaggaagtggtaga

SEQ ID NO: 52040 - DNA, 22 bp, Artificial Sequence
  Synthetic: FXN 5 forward 9:69036860-69036885; SpCas9
aagatgccaaggaagtggtaga

SEQ ID NO: 52041 - DNA, 21 bp, Artificial Sequence
  Synthetic: FXN 5 forward 9:69036861-69036885; SpCas9
agatgccaaggaagtggtaga

SEQ ID NO: 52042 - DNA, 20 bp, Artificial Sequence
  Synthetic: FXN 5 forward 9:69036862-69036885; SpCas9
gatgccaaggaagtggtaga

SEQ ID NO: 52043 - DNA, 19 bp, Artificial Sequence
  Synthetic: FXN 5 forward 9:69036863-69036885; SpCas9
atgccaaggaagtggtaga

SEQ ID NO: 52044 - DNA, 18 bp, Artificial Sequence
  Synthetic: FXN 5 forward 9:69036864-69036885; SpCas9
tgccaaggaagtggtaga

SEQ ID NO: 52045 - DNA, 25 bp, Artificial Sequence
  Synthetic: FXN 5 reverse 9:69036866-69036894; SpCas9
cgtgaaacaccctctaccacttcct

SEQ ID NO: 52046 - DNA, 24 bp, Artificial Sequence
  Synthetic: FXN 5 reverse 9:69036867-69036894; SpCas9
gtgaaacaccctctaccacttcct

SEQ ID NO: 52047 - DNA, 23 bp, Artificial Sequence
  Synthetic: FXN 5 reverse 9:69036868-69036894; SpCas9
tgaaacaccctctaccacttcct

SEQ ID NO: 52048 - DNA, 22 bp, Artificial Sequence
  Synthetic: FXN 5 reverse 9:69036869-69036894; SpCas9
gaaacaccctctaccacttcct

SEQ ID NO: 52049 - DNA, 21 bp, Artificial Sequence
  Synthetic: FXN 5 reverse 9:69036870-69036894; SpCas9
aaacaccctctaccacttcct

SEQ ID NO: 52050 - DNA, 20 bp, Artificial Sequence
  Synthetic: FXN 5 reverse 9:69036871-69036894; SpCas9
aacaccctctaccacttcct

SEQ ID NO: 52051 - DNA, 19 bp, Artificial Sequence
  Synthetic: FXN 5 reverse 9:69036872-69036894; SpCas9
acaccctctaccacttcct

SEQ ID NO: 52052 - DNA, 18 bp, Artificial Sequence
  Synthetic: FXN 5 reverse 9:69036873-69036894; SpCas9
caccctctaccacttcct

SEQ ID NO: 52053 - DNA, 25 bp, Artificial Sequence
  Synthetic: FXN 5 forward 9:69036868-69036896; SpCas9
aaggaagtggtagagggtgtttcac

SEQ ID NO: 52054 - DNA, 24 bp, Artificial Sequence
  Synthetic: FXN 5 forward 9:69036869-69036896; SpCas9
aggaagtggtagagggtgtttcac

SEQ ID NO: 52055 - DNA, 23 bp, Artificial Sequence
  Synthetic: FXN 5 forward 9:69036870-69036896; SpCas9
ggaagtggtagagggtgtttcac

SEQ ID NO: 52056 - DNA, 22 bp, Artificial Sequence
  Synthetic: FXN 5 forward 9:69036871-69036896; SpCas9
gaagtggtagagggtgtttcac

SEQ ID NO: 52057 - DNA, 21 bp, Artificial Sequence
  Synthetic: FXN 5 forward 9:69036872-69036896; SpCas9
aagtggtagagggtgtttcac

SEQ ID NO: 52058 - DNA, 20 bp, Artificial Sequence
  Synthetic: FXN 5 forward 9:69036873-69036896; SpCas9
agtggtagagggtgtttcac

SEQ ID NO: 52059 - DNA, 19 bp, Artificial Sequence
  Synthetic: FXN 5 forward 9:69036874-69036896; SpCas9
gtggtagagggtgtttcac

SEQ ID NO: 52060 - DNA, 18 bp, Artificial Sequence
  Synthetic: FXN 5 forward 9:69036875-69036896; SpCas9
tggtagagggtgtttcac

SEQ ID NO: 52061 - DNA, 25 bp, Artificial Sequence
  Synthetic: FXN 5 forward 9:69036869-69036897; SpCas9
aggaagtggtagagggtgtttcacg

SEQ ID NO: 52062 - DNA, 24 bp, Artificial Sequence
  Synthetic: FXN 5 forward 9:69036870-69036897; SpCas9
ggaagtggtagagggtgtttcacg

SEQ ID NO: 52063 - DNA, 23 bp, Artificial Sequence
  Synthetic: FXN 5 forward 9:69036871-69036897; SpCas9
gaagtggtagagggtgtttcacg

SEQ ID NO: 52064 - DNA, 22 bp, Artificial Sequence
  Synthetic: FXN 5 forward 9:69036872-69036897; SpCas9
aagtggtagagggtgtttcacg

SEQ ID NO: 52065 - DNA, 21 bp, Artificial Sequence
  Synthetic: FXN 5 forward 9:69036873-69036897; SpCas9
agtggtagagggtgtttcacg

SEQ ID NO: 52066 - DNA, 20 bp, Artificial Sequence
  Synthetic: FXN 5 forward 9:69036874-69036897; SpCas9
gtggtagagggtgtttcacg

SEQ ID NO: 52067 - DNA, 19 bp, Artificial Sequence
  Synthetic: FXN 5 forward 9:69036875-69036897; SpCas9
tggtagagggtgtttcacg

SEQ ID NO: 52068 - DNA, 18 bp, Artificial Sequence
  Synthetic: FXN 5 forward 9:69036876-69036897; SpCas9
ggtagagggtgtttcacg

SEQ ID NO: 52069 - DNA, 25 bp, Artificial Sequence
  Synthetic: FXN 5 forward 9:69036871-69036899; SpCas9
gaagtggtagagggtgtttcacgag

SEQ ID NO: 52070 - DNA, 24 bp, Artificial Sequence
  Synthetic: FXN 5 forward 9:69036872-69036899; SpCas9
aagtggtagagggtgtttcacgag

SEQ ID NO: 52071 - DNA, 23 bp, Artificial Sequence
  Synthetic: FXN 5 forward 9:69036873-69036899; SpCas9
agtggtagagggtgtttcacgag

SEQ ID NO: 52072 - DNA, 22 bp, Artificial Sequence
  Synthetic: FXN 5 forward 9:69036874-69036899; SpCas9
gtggtagagggtgtttcacgag

SEQ ID NO: 52073 - DNA, 21 bp, Artificial Sequence
  Synthetic: FXN 5 forward 9:69036875-69036899; SpCas9
tggtagagggtgtttcacgag

SEQ ID NO: 52074 - DNA, 20 bp, Artificial Sequence
  Synthetic: FXN 5 forward 9:69036876-69036899; SpCas9
ggtagagggtgtttcacgag

SEQ ID NO: 52075 - DNA, 19 bp, Artificial Sequence
  Synthetic: FXN 5 forward 9:69036877-69036899; SpCas9
gtagagggtgtttcacgag

SEQ ID NO: 52076 - DNA, 18 bp, Artificial Sequence
  Synthetic: FXN 5 forward 9:69036878-69036899; SpCas9
tagagggtgtttcacgag

SEQ ID NO: 52077 - DNA, 25 bp, Artificial Sequence
  Synthetic: FXN 5 forward 9:69036872-69036900; SpCas9
aagtggtagagggtgtttcacgagg

SEQ ID NO: 52078 - DNA, 24 bp, Artificial Sequence
  Synthetic: FXN 5 forward 9:69036873-69036900; SpCas9
agtggtagagggtgtttcacgagg

SEQ ID NO: 52079 - DNA, 23 bp, Artificial Sequence
  Synthetic: FXN 5 forward 9:69036874-69036900; SpCas9
gtggtagagggtgtttcacgagg

SEQ ID NO: 52080 - DNA, 22 bp, Artificial Sequence
  Synthetic: FXN 5 forward 9:69036875-69036900; SpCas9
tggtagagggtgtttcacgagg

SEQ ID NO: 52081 - DNA, 21 bp, Artificial Sequence
  Synthetic: FXN 5 forward 9:69036876-69036900; SpCas9
ggtagagggtgtttcacgagg

SEQ ID NO: 52082 - DNA, 20 bp, Artificial Sequence
  Synthetic: FXN 5 forward 9:69036877-69036900; SpCas9
gtagagggtgtttcacgagg

SEQ ID NO: 52083 - DNA, 19 bp, Artificial Sequence
  Synthetic: FXN 5 forward 9:69036878-69036900; SpCas9
tagagggtgtttcacgagg

SEQ ID NO: 52084 - DNA, 18 bp, Artificial Sequence
  Synthetic: FXN 5 forward 9:69036879-69036900; SpCas9
agagggtgtttcacgagg

SEQ ID NO: 52085 - DNA, 25 bp, Artificial Sequence
  Synthetic: FXN 5 forward 9:69036873-69036901; SpCas9
agtggtagagggtgtttcacgagga

SEQ ID NO: 52086 - DNA, 24 bp, Artificial Sequence
  Synthetic: FXN 5 forward 9:69036874-69036901; SpCas9
gtggtagagggtgtttcacgagga

SEQ ID NO: 52087 - DNA, 23 bp, Artificial Sequence
  Synthetic: FXN 5 forward 9:69036875-69036901; SpCas9
tggtagagggtgtttcacgagga

SEQ ID NO: 52088 - DNA, 22 bp, Artificial Sequence
  Synthetic: FXN 5 forward 9:69036876-69036901; SpCas9
ggtagagggtgtttcacgagga

SEQ ID NO: 52089 - DNA, 21 bp, Artificial Sequence
  Synthetic: FXN 5 forward 9:69036877-69036901; SpCas9
gtagagggtgtttcacgagga

SEQ ID NO: 52090 - DNA, 20 bp, Artificial Sequence
  Synthetic: FXN 5 forward 9:69036878-69036901; SpCas9
tagagggtgtttcacgagga

SEQ ID NO: 52091 - DNA, 19 bp, Artificial Sequence
  Synthetic: FXN 5 forward 9:69036879-69036901; SpCas9
agagggtgtttcacgagga

SEQ ID NO: 52092 - DNA, 18 bp, Artificial Sequence
  Synthetic: FXN 5 forward 9:69036880-69036901; SpCas9
gagggtgtttcacgagga

SEQ ID NO: 52093 - DNA, 25 bp, Artificial Sequence
  Synthetic: FXN 5 forward 9:69036883-69036911; SpCas9
ggtgtttcacgaggagggaaccgtc

SEQ ID NO: 52094 - DNA, 24 bp, Artificial Sequence
  Synthetic: FXN 5 forward 9:69036884-69036911; SpCas9
gtgtttcacgaggagggaaccgtc

SEQ ID NO: 52095 - DNA, 23 bp, Artificial Sequence
  Synthetic: FXN 5 forward 9:69036885-69036911; SpCas9
tgtttcacgaggagggaaccgtc

SEQ ID NO: 52096 - DNA, 22 bp, Artificial Sequence
  Synthetic: FXN 5 forward 9:69036886-69036911; SpCas9
gtttcacgaggagggaaccgtc

SEQ ID NO: 52097 - DNA, 21 bp, Artificial Sequence
  Synthetic: FXN 5 forward 9:69036887-69036911; SpCas9
tttcacgaggagggaaccgtc

SEQ ID NO: 52098 - DNA, 20 bp, Artificial Sequence
  Synthetic: FXN 5 forward 9:69036888-69036911; SpCas9
ttcacgaggagggaaccgtc

SEQ ID NO: 52099 - DNA, 19 bp, Artificial Sequence
  Synthetic: FXN 5 forward 9:69036889-69036911; SpCas9
tcacgaggagggaaccgtc

SEQ ID NO: 52100 - DNA, 18 bp, Artificial Sequence
  Synthetic: FXN 5 forward 9:69036890-69036911; SpCas9
cacgaggagggaaccgtc

SEQ ID NO: 52101 - DNA, 25 bp, Artificial Sequence
  Synthetic: FXN 5 forward 9:69036884-69036912; SpCas9
gtgtttcacgaggagggaaccgtct

SEQ ID NO: 52102 - DNA, 24 bp, Artificial Sequence
  Synthetic: FXN 5 forward 9:69036885-69036912; SpCas9
tgtttcacgaggagggaaccgtct

SEQ ID NO: 52103 - DNA, 23 bp, Artificial Sequence
  Synthetic: FXN 5 forward 9:69036886-69036912; SpCas9
gtttcacgaggagggaaccgtct

SEQ ID NO: 52104 - DNA, 22 bp, Artificial Sequence
  Synthetic: FXN 5 forward 9:69036887-69036912; SpCas9
tttcacgaggagggaaccgtct

SEQ ID NO: 52105 - DNA, 21 bp, Artificial Sequence
  Synthetic: FXN 5 forward 9:69036888-69036912; SpCas9
ttcacgaggagggaaccgtct

SEQ ID NO: 52106 - DNA, 20 bp, Artificial Sequence
  Synthetic: FXN 5 forward 9:69036889-69036912; SpCas9
tcacgaggagggaaccgtct

SEQ ID NO: 52107 - DNA, 19 bp, Artificial Sequence
  Synthetic: FXN 5 forward 9:69036890-69036912; SpCas9
cacgaggagggaaccgtct

SEQ ID NO: 52108 - DNA, 18 bp, Artificial Sequence
  Synthetic: FXN 5 forward 9:69036891-69036912; SpCas9
acgaggagggaaccgtct

SEQ ID NO: 52109 - DNA, 25 bp, Artificial Sequence
  Synthetic: FXN 5 forward 9:69036889-69036917; SpCas9
tcacgaggagggaaccgtctgggca

SEQ ID NO: 52110 - DNA, 24 bp, Artificial Sequence
  Synthetic: FXN 5 forward 9:69036890-69036917; SpCas9
cacgaggagggaaccgtctgggca

SEQ ID NO: 52111 - DNA, 23 bp, Artificial Sequence
  Synthetic: FXN 5 forward 9:69036891-69036917; SpCas9
acgaggagggaaccgtctgggca

SEQ ID NO: 52112 - DNA, 22 bp, Artificial Sequence
  Synthetic: FXN 5 forward 9:69036892-69036917; SpCas9
cgaggagggaaccgtctgggca

SEQ ID NO: 52113 - DNA, 21 bp, Artificial Sequence
  Synthetic: FXN 5 forward 9:69036893-69036917; SpCas9
gaggagggaaccgtctgggca

SEQ ID NO: 52114 - DNA, 20 bp, Artificial Sequence
  Synthetic: FXN 5 forward 9:69036894-69036917; SpCas9
aggagggaaccgtctgggca

SEQ ID NO: 52115 - DNA, 19 bp, Artificial Sequence
  Synthetic: FXN 5 forward 9:69036895-69036917; SpCas9
ggagggaaccgtctgggca

SEQ ID NO: 52116 - DNA, 18 bp, Artificial Sequence
  Synthetic: FXN 5 forward 9:69036896-69036917; SpCas9
gagggaaccgtctgggca

SEQ ID NO: 52117 - DNA, 25 bp, Artificial Sequence
  Synthetic: FXN 5 forward 9:69036890-69036918; SpCas9
cacgaggagggaaccgtctgggcaa

SEQ ID NO: 52118 - DNA, 24 bp, Artificial Sequence
  Synthetic: FXN 5 forward 9:69036891-69036918; SpCas9
acgaggagggaaccgtctgggcaa

SEQ ID NO: 52119 - DNA, 23 bp, Artificial Sequence
  Synthetic: FXN 5 forward 9:69036892-69036918; SpCas9
cgaggagggaaccgtctgggcaa

SEQ ID NO: 52120 - DNA, 22 bp, Artificial Sequence
  Synthetic: FXN 5 forward 9:69036893-69036918; SpCas9
gaggagggaaccgtctgggcaa

SEQ ID NO: 52121 - DNA, 21 bp, Artificial Sequence
  Synthetic: FXN 5 forward 9:69036894-69036918; SpCas9
aggagggaaccgtctgggcaa

SEQ ID NO: 52122 - DNA, 20 bp, Artificial Sequence
  Synthetic: FXN 5 forward 9:69036895-69036918; SpCas9
ggagggaaccgtctgggcaa

SEQ ID NO: 52123 - DNA, 19 bp, Artificial Sequence
  Synthetic: FXN 5 forward 9:69036896-69036918; SpCas9
gagggaaccgtctgggcaa

SEQ ID NO: 52124 - DNA, 18 bp, Artificial Sequence
  Synthetic: FXN 5 forward 9:69036897-69036918; SpCas9
agggaaccgtctgggcaa

SEQ ID NO: 52125 - DNA, 25 bp, Artificial Sequence
  Synthetic: FXN 5 forward 9:69036894-69036922; SpCas9
aggagggaaccgtctgggcaaaggc

SEQ ID NO: 52126 - DNA, 24 bp, Artificial Sequence
  Synthetic: FXN 5 forward 9:69036895-69036922; SpCas9
ggagggaaccgtctgggcaaaggc

SEQ ID NO: 52127 - DNA, 23 bp, Artificial Sequence
  Synthetic: FXN 5 forward 9:69036896-69036922; SpCas9
gagggaaccgtctgggcaaaggc

SEQ ID NO: 52128 - DNA, 22 bp, Artificial Sequence
  Synthetic: FXN 5 forward 9:69036897-69036922; SpCas9
agggaaccgtctgggcaaaggc

SEQ ID NO: 52129 - DNA, 21 bp, Artificial Sequence
  Synthetic: FXN 5 forward 9:69036898-69036922; SpCas9
gggaaccgtctgggcaaaggc

SEQ ID NO: 52130 - DNA, 20 bp, Artificial Sequence
  Synthetic: FXN 5 forward 9:69036899-69036922; SpCas9
ggaaccgtctgggcaaaggc

SEQ ID NO: 52131 - DNA, 19 bp, Artificial Sequence
  Synthetic: FXN 5 forward 9:69036900-69036922; SpCas9
gaaccgtctgggcaaaggc

SEQ ID NO: 52132 - DNA, 18 bp, Artificial Sequence
  Synthetic: FXN 5 forward 9:69036901-69036922; SpCas9
aaccgtctgggcaaaggc

SEQ ID NO: 52133 - DNA, 25 bp, Artificial Sequence
  Synthetic: FXN 5 forward 9:69036895-69036923; SpCas9
ggagggaaccgtctgggcaaaggcc

SEQ ID NO: 52134 - DNA, 24 bp, Artificial Sequence
  Synthetic: FXN 5 forward 9:69036896-69036923; SpCas9
gagggaaccgtctgggcaaaggcc

SEQ ID NO: 52135 - DNA, 23 bp, Artificial Sequence
  Synthetic: FXN 5 forward 9:69036897-69036923; SpCas9
agggaaccgtctgggcaaaggcc

SEQ ID NO: 52136 - DNA, 22 bp, Artificial Sequence
  Synthetic: FXN 5 forward 9:69036898-69036923; SpCas9
gggaaccgtctgggcaaaggcc

SEQ ID NO: 52137 - DNA, 21 bp, Artificial Sequence
  Synthetic: FXN 5 forward 9:69036899-69036923; SpCas9
ggaaccgtctgggcaaaggcc

SEQ ID NO: 52138 - DNA, 20 bp, Artificial Sequence
  Synthetic: FXN 5 forward 9:69036900-69036923; SpCas9
gaaccgtctgggcaaaggcc

SEQ ID NO: 52139 - DNA, 19 bp, Artificial Sequence
  Synthetic: FXN 5 forward 9:69036901-69036923; SpCas9
aaccgtctgggcaaaggcc

SEQ ID NO: 52140 - DNA, 18 bp, Artificial Sequence
  Synthetic: FXN 5 forward 9:69036902-69036923; SpCas9
accgtctgggcaaaggcc

SEQ ID NO: 52141 - DNA, 25 bp, Artificial Sequence
  Synthetic: FXN 5 forward 9:69036898-69036926; SpCas9
gggaaccgtctgggcaaaggccagg

SEQ ID NO: 52142 - DNA, 24 bp, Artificial Sequence
  Synthetic: FXN 5 forward 9:69036899-69036926; SpCas9
ggaaccgtctgggcaaaggccagg

SEQ ID NO: 52143 - DNA, 23 bp, Artificial Sequence
  Synthetic: FXN 5 forward 9:69036900-69036926; SpCas9
gaaccgtctgggcaaaggccagg

SEQ ID NO: 52144 - DNA, 22 bp, Artificial Sequence
  Synthetic: FXN 5 forward 9:69036901-69036926; SpCas9
aaccgtctgggcaaaggccagg

SEQ ID NO: 52145 - DNA, 21 bp, Artificial Sequence
  Synthetic: FXN 5 forward 9:69036902-69036926; SpCas9
accgtctgggcaaaggccagg

SEQ ID NO: 52146 - DNA, 20 bp, Artificial Sequence
  Synthetic: FXN 5 forward 9:69036903-69036926; SpCas9
ccgtctgggcaaaggccagg

SEQ ID NO: 52147 - DNA, 19 bp, Artificial Sequence
  Synthetic: FXN 5 forward 9:69036904-69036926; SpCas9
cgtctgggcaaaggccagg

SEQ ID NO: 52148 - DNA, 18 bp, Artificial Sequence
  Synthetic: FXN 5 forward 9:69036905-69036926; SpCas9
gtctgggcaaaggccagg

SEQ ID NO: 52149 - DNA, 25 bp, Artificial Sequence
  Synthetic: FXN 5 forward 9:69036899-69036927; SpCas9
ggaaccgtctgggcaaaggccagga

SEQ ID NO: 52150 - DNA, 24 bp, Artificial Sequence
  Synthetic: FXN 5 forward 9:69036900-69036927; SpCas9
gaaccgtctgggcaaaggccagga

SEQ ID NO: 52151 - DNA, 23 bp, Artificial Sequence
  Synthetic: FXN 5 forward 9:69036901-69036927; SpCas9
aaccgtctgggcaaaggccagga

SEQ ID NO: 52152 - DNA, 22 bp, Artificial Sequence
  Synthetic: FXN 5 forward 9:69036902-69036927; SpCas9
accgtctgggcaaaggccagga

SEQ ID NO: 52153 - DNA, 21 bp, Artificial Sequence
  Synthetic: FXN 5 forward 9:69036903-69036927; SpCas9
ccgtctgggcaaaggccagga

SEQ ID NO: 52154 - DNA, 20 bp, Artificial Sequence
  Synthetic: FXN 5 forward 9:69036904-69036927; SpCas9
cgtctgggcaaaggccagga

SEQ ID NO: 52155 - DNA, 19 bp, Artificial Sequence
  Synthetic: FXN 5 forward 9:69036905-69036927; SpCas9
gtctgggcaaaggccagga

SEQ ID NO: 52156 - DNA, 18 bp, Artificial Sequence
  Synthetic: FXN 5 forward 9:69036906-69036927; SpCas9
tctgggcaaaggccagga

SEQ ID NO: 52157 - DNA, 25 bp, Artificial Sequence
  Synthetic: FXN 5 forward 9:69036902-69036930; SpCas9
accgtctgggcaaaggccaggaagg

SEQ ID NO: 52158 - DNA, 24 bp, Artificial Sequence
  Synthetic: FXN 5 forward 9:69036903-69036930; SpCas9
ccgtctgggcaaaggccaggaagg

SEQ ID NO: 52159 - DNA, 23 bp, Artificial Sequence
  Synthetic: FXN 5 forward 9:69036904-69036930; SpCas9
cgtctgggcaaaggccaggaagg

SEQ ID NO: 52160 - DNA, 22 bp, Artificial Sequence
  Synthetic: FXN 5 forward 9:69036905-69036930; SpCas9
gtctgggcaaaggccaggaagg

SEQ ID NO: 52161 - DNA, 21 bp, Artificial Sequence
  Synthetic: FXN 5 forward 9:69036906-69036930; SpCas9
tctgggcaaaggccaggaagg

SEQ ID NO: 52162 - DNA, 20 bp, Artificial Sequence
  Synthetic: FXN 5 forward 9:69036907-69036930; SpCas9
ctgggcaaaggccaggaagg

SEQ ID NO: 52163 - DNA, 19 bp, Artificial Sequence
  Synthetic: FXN 5 forward 9:69036908-69036930; SpCas9
tgggcaaaggccaggaagg

SEQ ID NO: 52164 - DNA, 18 bp, Artificial Sequence
  Synthetic: FXN 5 forward 9:69036909-69036930; SpCas9
gggcaaaggccaggaagg

SEQ ID NO: 52165 - DNA, 25 bp, Artificial Sequence
  Synthetic: FXN 5 reverse 9:69036903-69036931; SpCas9
tccgccttcctggcctttgcccaga

SEQ ID NO: 52166 - DNA, 24 bp, Artificial Sequence
  Synthetic: FXN 5 reverse 9:69036904-69036931; SpCas9
ccgccttcctggcctttgcccaga

SEQ ID NO: 52167 - DNA, 23 bp, Artificial Sequence
  Synthetic: FXN 5 reverse 9:69036905-69036931; SpCas9
cgccttcctggcctttgcccaga

SEQ ID NO: 52168 - DNA, 22 bp, Artificial Sequence
  Synthetic: FXN 5 reverse 9:69036906-69036931; SpCas9
gccttcctggcctttgcccaga

SEQ ID NO: 52169 - DNA, 21 bp, Artificial Sequence
  Synthetic: FXN 5 reverse 9:69036907-69036931; SpCas9
ccttcctggcctttgcccaga

SEQ ID NO: 52170 - DNA, 20 bp, Artificial Sequence
  Synthetic: FXN 5 reverse 9:69036908-69036931; SpCas9
cttcctggcctttgcccaga

SEQ ID NO: 52171 - DNA, 19 bp, Artificial Sequence
  Synthetic: FXN 5 reverse 9:69036909-69036931; SpCas9
ttcctggcctttgcccaga

SEQ ID NO: 52172 - DNA, 18 bp, Artificial Sequence
  Synthetic: FXN 5 reverse 9:69036910-69036931; SpCas9
tcctggcctttgcccaga

SEQ ID NO: 52173 - DNA, 25 bp, Artificial Sequence
  Synthetic: FXN 5 forward 9:69036905-69036933; SpCas9
gtctgggcaaaggccaggaaggcgg

SEQ ID NO: 52174 - DNA, 24 bp, Artificial Sequence
  Synthetic: FXN 5 forward 9:69036906-69036933; SpCas9
tctgggcaaaggccaggaaggcgg

SEQ ID NO: 52175 - DNA, 23 bp, Artificial Sequence
  Synthetic: FXN 5 forward 9:69036907-69036933; SpCas9
ctgggcaaaggccaggaaggcgg

SEQ ID NO: 52176 - DNA, 22 bp, Artificial Sequence
  Synthetic: FXN 5 forward 9:69036908-69036933; SpCas9
tgggcaaaggccaggaaggcgg

SEQ ID NO: 52177 - DNA, 21 bp, Artificial Sequence
  Synthetic: FXN 5 forward 9:69036909-69036933; SpCas9
gggcaaaggccaggaaggcgg

SEQ ID NO: 52178 - DNA, 20 bp, Artificial Sequence
  Synthetic: FXN 5 forward 9:69036910-69036933; SpCas9
ggcaaaggccaggaaggcgg

SEQ ID NO: 52179 - DNA, 19 bp, Artificial Sequence
  Synthetic: FXN 5 forward 9:69036911-69036933; SpCas9
gcaaaggccaggaaggcgg

SEQ ID NO: 52180 - DNA, 18 bp, Artificial Sequence
  Synthetic: FXN 5 forward 9:69036912-69036933; SpCas9
caaaggccaggaaggcgg

SEQ ID NO: 52181 - DNA, 25 bp, Artificial Sequence
  Synthetic: FXN 5 forward 9:69036906-69036934; SpCas9
tctgggcaaaggccaggaaggcgga

SEQ ID NO: 52182 - DNA, 24 bp, Artificial Sequence
  Synthetic: FXN 5 forward 9:69036907-69036934; SpCas9
ctgggcaaaggccaggaaggcgga

SEQ ID NO: 52183 - DNA, 23 bp, Artificial Sequence
  Synthetic: FXN 5 forward 9:69036908-69036934; SpCas9
tgggcaaaggccaggaaggcgga

SEQ ID NO: 52184 - DNA, 22 bp, Artificial Sequence
  Synthetic: FXN 5 forward 9:69036909-69036934; SpCas9
gggcaaaggccaggaaggcgga

SEQ ID NO: 52185 - DNA, 21 bp, Artificial Sequence
  Synthetic: FXN 5 forward 9:69036910-69036934; SpCas9
ggcaaaggccaggaaggcgga

SEQ ID NO: 52186 - DNA, 20 bp, Artificial Sequence
  Synthetic: FXN 5 forward 9:69036911-69036934; SpCas9
gcaaaggccaggaaggcgga

SEQ ID NO: 52187 - DNA, 19 bp, Artificial Sequence
  Synthetic: FXN 5 forward 9:69036912-69036934; SpCas9
caaaggccaggaaggcgga

SEQ ID NO: 52188 - DNA, 18 bp, Artificial Sequence
  Synthetic: FXN 5 forward 9:69036913-69036934; SpCas9
aaaggccaggaaggcgga

SEQ ID NO: 52189 - DNA, 25 bp, Artificial Sequence
  Synthetic: FXN 5 forward 9:69036907-69036935; SpCas9
ctgggcaaaggccaggaaggcggaa

SEQ ID NO: 52190 - DNA, 24 bp, Artificial Sequence
  Synthetic: FXN 5 forward 9:69036908-69036935; SpCas9
tgggcaaaggccaggaaggcggaa

SEQ ID NO: 52191 - DNA, 23 bp, Artificial Sequence
  Synthetic: FXN 5 forward 9:69036909-69036935; SpCas9
gggcaaaggccaggaaggcggaa

SEQ ID NO: 52192 - DNA, 22 bp, Artificial Sequence
  Synthetic: FXN 5 forward 9:69036910-69036935; SpCas9
ggcaaaggccaggaaggcggaa

SEQ ID NO: 52193 - DNA, 21 bp, Artificial Sequence
  Synthetic: FXN 5 forward 9:69036911-69036935; SpCas9
gcaaaggccaggaaggcggaa

SEQ ID NO: 52194 - DNA, 20 bp, Artificial Sequence
  Synthetic: FXN 5 forward 9:69036912-69036935; SpCas9
caaaggccaggaaggcggaa

SEQ ID NO: 52195 - DNA, 19 bp, Artificial Sequence
  Synthetic: FXN 5 forward 9:69036913-69036935; SpCas9
aaaggccaggaaggcggaa

SEQ ID NO: 52196 - DNA, 18 bp, Artificial Sequence
  Synthetic: FXN 5 forward 9:69036914-69036935; SpCas9
aaggccaggaaggcggaa

SEQ ID NO: 52197 - DNA, 25 bp, Artificial Sequence
  Synthetic: FXN 5 reverse 9:69036907-69036935; SpCas9
cccttccgccttcctggcctttgcc

SEQ ID NO: 52198 - DNA, 24 bp, Artificial Sequence
  Synthetic: FXN 5 reverse 9:69036908-69036935; SpCas9
ccttccgccttcctggcctttgcc

SEQ ID NO: 52199 - DNA, 23 bp, Artificial Sequence
  Synthetic: FXN 5 reverse 9:69036909-69036935; SpCas9
cttccgccttcctggcctttgcc

SEQ ID NO: 52200 - DNA, 22 bp, Artificial Sequence
  Synthetic: FXN 5 reverse 9:69036910-69036935; SpCas9
ttccgccttcctggcctttgcc

SEQ ID NO: 52201 - DNA, 21 bp, Artificial Sequence
  Synthetic: FXN 5 reverse 9:69036911-69036935; SpCas9
tccgccttcctggcctttgcc

SEQ ID NO: 52202 - DNA, 20 bp, Artificial Sequence
  Synthetic: FXN 5 reverse 9:69036912-69036935; SpCas9
ccgccttcctggcctttgcc

SEQ ID NO: 52203 - DNA, 19 bp, Artificial Sequence
  Synthetic: FXN 5 reverse 9:69036913-69036935; SpCas9
cgccttcctggcctttgcc

SEQ ID NO: 52204 - DNA, 18 bp, Artificial Sequence
  Synthetic: FXN 5 reverse 9:69036914-69036935; SpCas9
gccttcctggcctttgcc

SEQ ID NO: 52205 - DNA, 25 bp, Artificial Sequence
  Synthetic: FXN 5 forward 9:69036908-69036936; SpCas9
tgggcaaaggccaggaaggcggaag

SEQ ID NO: 52206 - DNA, 24 bp, Artificial Sequence
  Synthetic: FXN 5 forward 9:69036909-69036936; SpCas9
gggcaaaggccaggaaggcggaag

SEQ ID NO: 52207 - DNA, 23 bp, Artificial Sequence
  Synthetic: FXN 5 forward 9:69036910-69036936; SpCas9
ggcaaaggccaggaaggcggaag

SEQ ID NO: 52208 - DNA, 22 bp, Artificial Sequence
  Synthetic: FXN 5 forward 9:69036911-69036936; SpCas9
gcaaaggccaggaaggcggaag

SEQ ID NO: 52209 - DNA, 21 bp, Artificial Sequence
  Synthetic: FXN 5 forward 9:69036912-69036936; SpCas9
caaaggccaggaaggcggaag

SEQ ID NO: 52210 - DNA, 20 bp, Artificial Sequence
  Synthetic: FXN 5 forward 9:69036913-69036936; SpCas9
aaaggccaggaaggcggaag

SEQ ID NO: 52211 - DNA, 19 bp, Artificial Sequence
  Synthetic: FXN 5 forward 9:69036914-69036936; SpCas9
aaggccaggaaggcggaag

SEQ ID NO: 52212 - DNA, 18 bp, Artificial Sequence
  Synthetic: FXN 5 forward 9:69036915-69036936; SpCas9
aggccaggaaggcggaag

SEQ ID NO: 52213 - DNA, 25 bp, Artificial Sequence
  Synthetic: FXN 5 forward 9:69036918-69036946; SpCas9
ccaggaaggcggaaggggatccctt

SEQ ID NO: 52214 - DNA, 24 bp, Artificial Sequence
  Synthetic: FXN 5 forward 9:69036919-69036946; SpCas9
caggaaggcggaaggggatccctt

SEQ ID NO: 52215 - DNA, 23 bp, Artificial Sequence
  Synthetic: FXN 5 forward 9:69036920-69036946; SpCas9
aggaaggcggaaggggatccctt

SEQ ID NO: 52216 - DNA, 22 bp, Artificial Sequence
  Synthetic: FXN 5 forward 9:69036921-69036946; SpCas9
ggaaggcggaaggggatccctt

SEQ ID NO: 52217 - DNA, 21 bp, Artificial Sequence
  Synthetic: FXN 5 forward 9:69036922-69036946; SpCas9
gaaggcggaaggggatccctt

SEQ ID NO: 52218 - DNA, 20 bp, Artificial Sequence
  Synthetic: FXN 5 forward 9:69036923-69036946; SpCas9
aaggcggaaggggatccctt

SEQ ID NO: 52219 - DNA, 19 bp, Artificial Sequence
  Synthetic: FXN 5 forward 9:69036924-69036946; SpCas9
aggcggaaggggatccctt

SEQ ID NO: 52220 - DNA, 18 bp, Artificial Sequence
  Synthetic: FXN 5 forward 9:69036925-69036946; SpCas9
ggcggaaggggatccctt

SEQ ID NO: 52221 - DNA, 25 bp, Artificial Sequence
  Synthetic: FXN 5 reverse 9:69036918-69036946; SpCas9
ctgaagggatccccttccgccttcc

SEQ ID NO: 52222 - DNA, 24 bp, Artificial Sequence
  Synthetic: FXN 5 reverse 9:69036919-69036946; SpCas9
tgaagggatccccttccgccttcc

SEQ ID NO: 52223 - DNA, 23 bp, Artificial Sequence
  Synthetic: FXN 5 reverse 9:69036920-69036946; SpCas9
gaagggatccccttccgccttcc

SEQ ID NO: 52224 - DNA, 22 bp, Artificial Sequence
  Synthetic: FXN 5 reverse 9:69036921-69036946; SpCas9
aagggatccccttccgccttcc

SEQ ID NO: 52225 - DNA, 21 bp, Artificial Sequence
  Synthetic: FXN 5 reverse 9:69036922-69036946; SpCas9
agggatccccttccgccttcc

SEQ ID NO: 52226 - DNA, 20 bp, Artificial Sequence
  Synthetic: FXN 5 reverse 9:69036923-69036946; SpCas9
gggatccccttccgccttcc

SEQ ID NO: 52227 - DNA, 19 bp, Artificial Sequence
  Synthetic: FXN 5 reverse 9:69036924-69036946; SpCas9
ggatccccttccgccttcc

SEQ ID NO: 52228 - DNA, 18 bp, Artificial Sequence
  Synthetic: FXN 5 reverse 9:69036925-69036946; SpCas9
gatccccttccgccttcc

SEQ ID NO: 52229 - DNA, 25 bp, Artificial Sequence
  Synthetic: FXN 5 forward 9:69036920-69036948; SpCas9
aggaaggcggaaggggatcccttca

SEQ ID NO: 52230 - DNA, 24 bp, Artificial Sequence
  Synthetic: FXN 5 forward 9:69036921-69036948; SpCas9
ggaaggcggaaggggatcccttca

SEQ ID NO: 52231 - DNA, 23 bp, Artificial Sequence
  Synthetic: FXN 5 forward 9:69036922-69036948; SpCas9
gaaggcggaaggggatcccttca

SEQ ID NO: 52232 - DNA, 22 bp, Artificial Sequence
  Synthetic: FXN 5 forward 9:69036923-69036948; SpCas9
aaggcggaaggggatcccttca

SEQ ID NO: 52233 - DNA, 21 bp, Artificial Sequence
  Synthetic: FXN 5 forward 9:69036924-69036948; SpCas9
aggcggaaggggatcccttca

SEQ ID NO: 52234 - DNA, 20 bp, Artificial Sequence
  Synthetic: FXN 5 forward 9:69036925-69036948; SpCas9
ggcggaaggggatcccttca

SEQ ID NO: 52235 - DNA, 19 bp, Artificial Sequence
  Synthetic: FXN 5 forward 9:69036926-69036948; SpCas9
gcggaaggggatcccttca

SEQ ID NO: 52236 - DNA, 18 bp, Artificial Sequence
  Synthetic: FXN 5 forward 9:69036927-69036948; SpCas9
cggaaggggatcccttca

SEQ ID NO: 52237 - DNA, 25 bp, Artificial Sequence
  Synthetic: FXN 5 forward 9:69036923-69036951; SpCas9
aaggcggaaggggatcccttcagag

SEQ ID NO: 52238 - DNA, 24 bp, Artificial Sequence
  Synthetic: FXN 5 forward 9:69036924-69036951; SpCas9
aggcggaaggggatcccttcagag

SEQ ID NO: 52239 - DNA, 23 bp, Artificial Sequence
  Synthetic: FXN 5 forward 9:69036925-69036951; SpCas9
ggcggaaggggatcccttcagag

SEQ ID NO: 52240 - DNA, 22 bp, Artificial Sequence
  Synthetic: FXN 5 forward 9:69036926-69036951; SpCas9
gcggaaggggatcccttcagag

SEQ ID NO: 52241 - DNA, 21 bp, Artificial Sequence
  Synthetic: FXN 5 forward 9:69036927-69036951; SpCas9
cggaaggggatcccttcagag

SEQ ID NO: 52242 - DNA, 20 bp, Artificial Sequence
  Synthetic: FXN 5 forward 9:69036928-69036951; SpCas9
ggaaggggatcccttcagag

SEQ ID NO: 52243 - DNA, 19 bp, Artificial Sequence
  Synthetic: FXN 5 forward 9:69036929-69036951; SpCas9
gaaggggatcccttcagag

SEQ ID NO: 52244 - DNA, 18 bp, Artificial Sequence
  Synthetic: FXN 5 forward 9:69036930-69036951; SpCas9
aaggggatcccttcagag

SEQ ID NO: 52245 - DNA, 25 bp, Artificial Sequence
  Synthetic: FXN 5 forward 9:69036927-69036955; SpCas9
cggaaggggatcccttcagagtggc

SEQ ID NO: 52246 - DNA, 24 bp, Artificial Sequence
  Synthetic: FXN 5 forward 9:69036928-69036955; SpCas9
ggaaggggatcccttcagagtggc

SEQ ID NO: 52247 - DNA, 23 bp, Artificial Sequence
  Synthetic: FXN 5 forward 9:69036929-69036955; SpCas9
gaaggggatcccttcagagtggc

SEQ ID NO: 52248 - DNA, 22 bp, Artificial Sequence
  Synthetic: FXN 5 forward 9:69036930-69036955; SpCas9
aaggggatcccttcagagtggc

SEQ ID NO: 52249 - DNA, 21 bp, Artificial Sequence
  Synthetic: FXN 5 forward 9:69036931-69036955; SpCas9
aggggatcccttcagagtggc

SEQ ID NO: 52250 - DNA, 20 bp, Artificial Sequence
  Synthetic: FXN 5 forward 9:69036932-69036955; SpCas9
ggggatcccttcagagtggc

SEQ ID NO: 52251 - DNA, 19 bp, Artificial Sequence
  Synthetic: FXN 5 forward 9:69036933-69036955; SpCas9
gggatcccttcagagtggc

SEQ ID NO: 52252 - DNA, 18 bp, Artificial Sequence
  Synthetic: FXN 5 forward 9:69036934-69036955; SpCas9
ggatcccttcagagtggc

SEQ ID NO: 52253 - DNA, 25 bp, Artificial Sequence
  Synthetic: FXN 5 reverse 9:69036938-69036966; SpCas9
catgcggcgtaccagccactctgaa

SEQ ID NO: 52254 - DNA, 24 bp, Artificial Sequence
  Synthetic: FXN 5 reverse 9:69036939-69036966; SpCas9
atgcggcgtaccagccactctgaa

SEQ ID NO: 52255 - DNA, 23 bp, Artificial Sequence
  Synthetic: FXN 5 reverse 9:69036940-69036966; SpCas9
tgcggcgtaccagccactctgaa

SEQ ID NO: 52256 - DNA, 22 bp, Artificial Sequence
  Synthetic: FXN 5 reverse 9:69036941-69036966; SpCas9
gcggcgtaccagccactctgaa

SEQ ID NO: 52257 - DNA, 21 bp, Artificial Sequence
  Synthetic: FXN 5 reverse 9:69036942-69036966; SpCas9
cggcgtaccagccactctgaa

SEQ ID NO: 52258 - DNA, 20 bp, Artificial Sequence
  Synthetic: FXN 5 reverse 9:69036943-69036966; SpCas9
ggcgtaccagccactctgaa

SEQ ID NO: 52259 - DNA, 19 bp, Artificial Sequence
  Synthetic: FXN 5 reverse 9:69036944-69036966; SpCas9
gcgtaccagccactctgaa

SEQ ID NO: 52260 - DNA, 18 bp, Artificial Sequence
  Synthetic: FXN 5 reverse 9:69036945-69036966; SpCas9
cgtaccagccactctgaa

SEQ ID NO: 52261 - DNA, 25 bp, Artificial Sequence
  Synthetic: FXN 5 reverse 9:69036939-69036967; SpCas9
acatgcggcgtaccagccactctga

SEQ ID NO: 52262 - DNA, 24 bp, Artificial Sequence
  Synthetic: FXN 5 reverse 9:69036940-69036967; SpCas9
catgcggcgtaccagccactctga

SEQ ID NO: 52263 - DNA, 23 bp, Artificial Sequence
  Synthetic: FXN 5 reverse 9:69036941-69036967; SpCas9
atgcggcgtaccagccactctga

SEQ ID NO: 52264 - DNA, 22 bp, Artificial Sequence
  Synthetic: FXN 5 reverse 9:69036942-69036967; SpCas9
tgcggcgtaccagccactctga

SEQ ID NO: 52265 - DNA, 21 bp, Artificial Sequence
  Synthetic: FXN 5 reverse 9:69036943-69036967; SpCas9
gcggcgtaccagccactctga

SEQ ID NO: 52266 - DNA, 20 bp, Artificial Sequence
  Synthetic: FXN 5 reverse 9:69036944-69036967; SpCas9
cggcgtaccagccactctga

SEQ ID NO: 52267 - DNA, 19 bp, Artificial Sequence
  Synthetic: FXN 5 reverse 9:69036945-69036967; SpCas9
ggcgtaccagccactctga

SEQ ID NO: 52268 - DNA, 18 bp, Artificial Sequence
  Synthetic: FXN 5 reverse 9:69036946-69036967; SpCas9
gcgtaccagccactctga

SEQ ID NO: 52269 - DNA, 25 bp, Artificial Sequence
  Synthetic: FXN 5 reverse 9:69036940-69036968; SpCas9
tacatgcggcgtaccagccactctg

SEQ ID NO: 52270 - DNA, 24 bp, Artificial Sequence
  Synthetic: FXN 5 reverse 9:69036941-69036968; SpCas9
acatgcggcgtaccagccactctg

SEQ ID NO: 52271 - DNA, 23 bp, Artificial Sequence
  Synthetic: FXN 5 reverse 9:69036942-69036968; SpCas9
catgcggcgtaccagccactctg

SEQ ID NO: 52272 - DNA, 22 bp, Artificial Sequence
  Synthetic: FXN 5 reverse 9:69036943-69036968; SpCas9
atgcggcgtaccagccactctg

SEQ ID NO: 52273 - DNA, 21 bp, Artificial Sequence
  Synthetic: FXN 5 reverse 9:69036944-69036968; SpCas9
tgcggcgtaccagccactctg

SEQ ID NO: 52274 - DNA, 20 bp, Artificial Sequence
  Synthetic: FXN 5 reverse 9:69036945-69036968; SpCas9
gcggcgtaccagccactctg

SEQ ID NO: 52275 - DNA, 19 bp, Artificial Sequence
  Synthetic: FXN 5 reverse 9:69036946-69036968; SpCas9
cggcgtaccagccactctg

SEQ ID NO: 52276 - DNA, 18 bp, Artificial Sequence
  Synthetic: FXN 5 reverse 9:69036947-69036968; SpCas9
ggcgtaccagccactctg

SEQ ID NO: 52277 - DNA, 25 bp, Artificial Sequence
  Synthetic: FXN 5 forward 9:69036944-69036972; SpCas9
agagtggctggtacgccgcatgtat

SEQ ID NO: 52278 - DNA, 24 bp, Artificial Sequence
  Synthetic: FXN 5 forward 9:69036945-69036972; SpCas9
gagtggctggtacgccgcatgtat

SEQ ID NO: 52279 - DNA, 23 bp, Artificial Sequence
  Synthetic: FXN 5 forward 9:69036946-69036972; SpCas9
agtggctggtacgccgcatgtat

SEQ ID NO: 52280 - DNA, 22 bp, Artificial Sequence
  Synthetic: FXN 5 forward 9:69036947-69036972; SpCas9
gtggctggtacgccgcatgtat

SEQ ID NO: 52281 - DNA, 21 bp, Artificial Sequence
  Synthetic: FXN 5 forward 9:69036948-69036972; SpCas9
tggctggtacgccgcatgtat

SEQ ID NO: 52282 - DNA, 20 bp, Artificial Sequence
  Synthetic: FXN 5 forward 9:69036949-69036972; SpCas9
ggctggtacgccgcatgtat

SEQ ID NO: 52283 - DNA, 19 bp, Artificial Sequence
  Synthetic: FXN 5 forward 9:69036950-69036972; SpCas9
gctggtacgccgcatgtat

SEQ ID NO: 52284 - DNA, 18 bp, Artificial Sequence
  Synthetic: FXN 5 forward 9:69036951-69036972; SpCas9
ctggtacgccgcatgtat

SEQ ID NO: 52285 - DNA, 25 bp, Artificial Sequence
  Synthetic: FXN 5 forward 9:69036945-69036973; SpCas9
gagtggctggtacgccgcatgtatt

SEQ ID NO: 52286 - DNA, 24 bp, Artificial Sequence
  Synthetic: FXN 5 forward 9:69036946-69036973; SpCas9
agtggctggtacgccgcatgtatt

SEQ ID NO: 52287 - DNA, 23 bp, Artificial Sequence
  Synthetic: FXN 5 forward 9:69036947-69036973; SpCas9
gtggctggtacgccgcatgtatt

SEQ ID NO: 52288 - DNA, 22 bp, Artificial Sequence
  Synthetic: FXN 5 forward 9:69036948-69036973; SpCas9
tggctggtacgccgcatgtatt

SEQ ID NO: 52289 - DNA, 21 bp, Artificial Sequence
  Synthetic: FXN 5 forward 9:69036949-69036973; SpCas9
ggctggtacgccgcatgtatt

SEQ ID NO: 52290 - DNA, 20 bp, Artificial Sequence
  Synthetic: FXN 5 forward 9:69036950-69036973; SpCas9
gctggtacgccgcatgtatt

SEQ ID NO: 52291 - DNA, 19 bp, Artificial Sequence
  Synthetic: FXN 5 forward 9:69036951-69036973; SpCas9
ctggtacgccgcatgtatt

SEQ ID NO: 52292 - DNA, 18 bp, Artificial Sequence
  Synthetic: FXN 5 forward 9:69036952-69036973; SpCas9
tggtacgccgcatgtatt

SEQ ID NO: 52293 - DNA, 25 bp, Artificial Sequence
  Synthetic: FXN 5 forward 9:69036946-69036974; SpCas9
agtggctggtacgccgcatgtatta

SEQ ID NO: 52294 - DNA, 24 bp, Artificial Sequence
  Synthetic: FXN 5 forward 9:69036947-69036974; SpCas9
gtggctggtacgccgcatgtatta

SEQ ID NO: 52295 - DNA, 23 bp, Artificial Sequence
  Synthetic: FXN 5 forward 9:69036948-69036974; SpCas9
tggctggtacgccgcatgtatta

SEQ ID NO: 52296 - DNA, 22 bp, Artificial Sequence
  Synthetic: FXN 5 forward 9:69036949-69036974; SpCas9
ggctggtacgccgcatgtatta

SEQ ID NO: 52297 - DNA, 21 bp, Artificial Sequence
  Synthetic: FXN 5 forward 9:69036950-69036974; SpCas9
gctggtacgccgcatgtatta

SEQ ID NO: 52298 - DNA, 20 bp, Artificial Sequence
  Synthetic: FXN 5 forward 9:69036951-69036974; SpCas9
ctggtacgccgcatgtatta

SEQ ID NO: 52299 - DNA, 19 bp, Artificial Sequence
  Synthetic: FXN 5 forward 9:69036952-69036974; SpCas9
tggtacgccgcatgtatta

SEQ ID NO: 52300 - DNA, 18 bp, Artificial Sequence
  Synthetic: FXN 5 forward 9:69036953-69036974; SpCas9
ggtacgccgcatgtatta

SEQ ID NO: 52301 - DNA, 25 bp, Artificial Sequence
  Synthetic: FXN 5 forward 9:69036947-69036975; SpCas9
gtggctggtacgccgcatgtattag

SEQ ID NO: 52302 - DNA, 24 bp, Artificial Sequence
  Synthetic: FXN 5 forward 9:69036948-69036975; SpCas9
tggctggtacgccgcatgtattag

SEQ ID NO: 52303 - DNA, 23 bp, Artificial Sequence
  Synthetic: FXN 5 forward 9:69036949-69036975; SpCas9
ggctggtacgccgcatgtattag

SEQ ID NO: 52304 - DNA, 22 bp, Artificial Sequence
  Synthetic: FXN 5 forward 9:69036950-69036975; SpCas9
gctggtacgccgcatgtattag

SEQ ID NO: 52305 - DNA, 21 bp, Artificial Sequence
  Synthetic: FXN 5 forward 9:69036951-69036975; SpCas9
ctggtacgccgcatgtattag

SEQ ID NO: 52306 - DNA, 20 bp, Artificial Sequence
  Synthetic: FXN 5 forward 9:69036952-69036975; SpCas9
tggtacgccgcatgtattag

SEQ ID NO: 52307 - DNA, 19 bp, Artificial Sequence
  Synthetic: FXN 5 forward 9:69036953-69036975; SpCas9
ggtacgccgcatgtattag

SEQ ID NO: 52308 - DNA, 18 bp, Artificial Sequence
  Synthetic: FXN 5 forward 9:69036954-69036975; SpCas9
gtacgccgcatgtattag

SEQ ID NO: 52309 - DNA, 25 bp, Artificial Sequence
  Synthetic: FXN 5 forward 9:69036949-69036977; SpCas9
ggctggtacgccgcatgtattaggg

SEQ ID NO: 52310 - DNA, 24 bp, Artificial Sequence
  Synthetic: FXN 5 forward 9:69036950-69036977; SpCas9
gctggtacgccgcatgtattaggg

SEQ ID NO: 52311 - DNA, 23 bp, Artificial Sequence
  Synthetic: FXN 5 forward 9:69036951-69036977; SpCas9
ctggtacgccgcatgtattaggg

SEQ ID NO: 52312 - DNA, 22 bp, Artificial Sequence
  Synthetic: FXN 5 forward 9:69036952-69036977; SpCas9
tggtacgccgcatgtattaggg

SEQ ID NO: 52313 - DNA, 21 bp, Artificial Sequence
  Synthetic: FXN 5 forward 9:69036953-69036977; SpCas9
ggtacgccgcatgtattaggg

SEQ ID NO: 52314 - DNA, 20 bp, Artificial Sequence
  Synthetic: FXN 5 forward 9:69036954-69036977; SpCas9
gtacgccgcatgtattaggg

SEQ ID NO: 52315 - DNA, 19 bp, Artificial Sequence
  Synthetic: FXN 5 forward 9:69036955-69036977; SpCas9
tacgccgcatgtattaggg

SEQ ID NO: 52316 - DNA, 18 bp, Artificial Sequence
  Synthetic: FXN 5 forward 9:69036956-69036977; SpCas9
acgccgcatgtattaggg

SEQ ID NO: 52317 - DNA, 25 bp, Artificial Sequence
  Synthetic: FXN 5 reverse 9:69036951-69036979; SpCas9
atctcccctaatacatgcggcgtac

SEQ ID NO: 52318 - DNA, 24 bp, Artificial Sequence
  Synthetic: FXN 5 reverse 9:69036952-69036979; SpCas9
tctcccctaatacatgcggcgtac

SEQ ID NO: 52319 - DNA, 23 bp, Artificial Sequence
  Synthetic: FXN 5 reverse 9:69036953-69036979; SpCas9
ctcccctaatacatgcggcgtac

SEQ ID NO: 52320 - DNA, 22 bp, Artificial Sequence
  Synthetic: FXN 5 reverse 9:69036954-69036979; SpCas9
tcccctaatacatgcggcgtac

SEQ ID NO: 52321 - DNA, 21 bp, Artificial Sequence
  Synthetic: FXN 5 reverse 9:69036955-69036979; SpCas9
cccctaatacatgcggcgtac

SEQ ID NO: 52322 - DNA, 20 bp, Artificial Sequence
  Synthetic: FXN 5 reverse 9:69036956-69036979; SpCas9
ccctaatacatgcggcgtac

SEQ ID NO: 52323 - DNA, 19 bp, Artificial Sequence
  Synthetic: FXN 5 reverse 9:69036957-69036979; SpCas9
cctaatacatgcggcgtac

SEQ ID NO: 52324 - DNA, 18 bp, Artificial Sequence
  Synthetic: FXN 5 reverse 9:69036958-69036979; SpCas9
ctaatacatgcggcgtac

SEQ ID NO: 52325 - DNA, 25 bp, Artificial Sequence
  Synthetic: FXN 5 forward 9:69036956-69036984; SpCas9
acgccgcatgtattaggggagatga

SEQ ID NO: 52326 - DNA, 24 bp, Artificial Sequence
  Synthetic: FXN 5 forward 9:69036957-69036984; SpCas9
cgccgcatgtattaggggagatga

SEQ ID NO: 52327 - DNA, 23 bp, Artificial Sequence
  Synthetic: FXN 5 forward 9:69036958-69036984; SpCas9
gccgcatgtattaggggagatga

SEQ ID NO: 52328 - DNA, 22 bp, Artificial Sequence
  Synthetic: FXN 5 forward 9:69036959-69036984; SpCas9
ccgcatgtattaggggagatga

SEQ ID NO: 52329 - DNA, 21 bp, Artificial Sequence
  Synthetic: FXN 5 forward 9:69036960-69036984; SpCas9
cgcatgtattaggggagatga

SEQ ID NO: 52330 - DNA, 20 bp, Artificial Sequence
  Synthetic: FXN 5 forward 9:69036961-69036984; SpCas9
gcatgtattaggggagatga

SEQ ID NO: 52331 - DNA, 19 bp, Artificial Sequence
  Synthetic: FXN 5 forward 9:69036962-69036984; SpCas9
catgtattaggggagatga

SEQ ID NO: 52332 - DNA, 18 bp, Artificial Sequence
  Synthetic: FXN 5 forward 9:69036963-69036984; SpCas9
atgtattaggggagatga

SEQ ID NO: 52333 - DNA, 25 bp, Artificial Sequence
  Synthetic: FXN 5 forward 9:69036958-69036986; SpCas9
gccgcatgtattaggggagatgaaa

SEQ ID NO: 52334 - DNA, 24 bp, Artificial Sequence
  Synthetic: FXN 5 forward 9:69036959-69036986; SpCas9
ccgcatgtattaggggagatgaaa

SEQ ID NO: 52335 - DNA, 23 bp, Artificial Sequence
  Synthetic: FXN 5 forward 9:69036960-69036986; SpCas9
cgcatgtattaggggagatgaaa

SEQ ID NO: 52336 - DNA, 22 bp, Artificial Sequence
  Synthetic: FXN 5 forward 9:69036961-69036986; SpCas9
gcatgtattaggggagatgaaa

SEQ ID NO: 52337 - DNA, 21 bp, Artificial Sequence
  Synthetic: FXN 5 forward 9:69036962-69036986; SpCas9
catgtattaggggagatgaaa

SEQ ID NO: 52338 - DNA, 20 bp, Artificial Sequence
  Synthetic: FXN 5 forward 9:69036963-69036986; SpCas9
atgtattaggggagatgaaa

SEQ ID NO: 52339 - DNA, 19 bp, Artificial Sequence
  Synthetic: FXN 5 forward 9:69036964-69036986; SpCas9
tgtattaggggagatgaaa

SEQ ID NO: 52340 - DNA, 18 bp, Artificial Sequence
  Synthetic: FXN 5 forward 9:69036965-69036986; SpCas9
gtattaggggagatgaaa

SEQ ID NO: 52341 - DNA, 25 bp, Artificial Sequence
  Synthetic: FXN 5 forward 9:69036959-69036987; SpCas9
ccgcatgtattaggggagatgaaag

SEQ ID NO: 52342 - DNA, 24 bp, Artificial Sequence
  Synthetic: FXN 5 forward 9:69036960-69036987; SpCas9
cgcatgtattaggggagatgaaag

SEQ ID NO: 52343 - DNA, 23 bp, Artificial Sequence
  Synthetic: FXN 5 forward 9:69036961-69036987; SpCas9
gcatgtattaggggagatgaaag

SEQ ID NO: 52344 - DNA, 22 bp, Artificial Sequence
  Synthetic: FXN 5 forward 9:69036962-69036987; SpCas9
catgtattaggggagatgaaag

SEQ ID NO: 52345 - DNA, 21 bp, Artificial Sequence
  Synthetic: FXN 5 forward 9:69036963-69036987; SpCas9
atgtattaggggagatgaaag

SEQ ID NO: 52346 - DNA, 20 bp, Artificial Sequence
  Synthetic: FXN 5 forward 9:69036964-69036987; SpCas9
tgtattaggggagatgaaag

SEQ ID NO: 52347 - DNA, 19 bp, Artificial Sequence
  Synthetic: FXN 5 forward 9:69036965-69036987; SpCas9
gtattaggggagatgaaag

SEQ ID NO: 52348 - DNA, 18 bp, Artificial Sequence
  Synthetic: FXN 5 forward 9:69036966-69036987; SpCas9
tattaggggagatgaaag

SEQ ID NO: 52349 - DNA, 25 bp, Artificial Sequence
  Synthetic: FXN 5 reverse 9:69036959-69036987; SpCas9
cctctttcatctcccctaatacatg

SEQ ID NO: 52350 - DNA, 24 bp, Artificial Sequence
  Synthetic: FXN 5 reverse 9:69036960-69036987; SpCas9
ctctttcatctcccctaatacatg

SEQ ID NO: 52351 - DNA, 23 bp, Artificial Sequence
  Synthetic: FXN 5 reverse 9:69036961-69036987; SpCas9
tctttcatctcccctaatacatg

SEQ ID NO: 52352 - DNA, 22 bp, Artificial Sequence
  Synthetic: FXN 5 reverse 9:69036962-69036987; SpCas9
ctttcatctcccctaatacatg

SEQ ID NO: 52353 - DNA, 21 bp, Artificial Sequence
  Synthetic: FXN 5 reverse 9:69036963-69036987; SpCas9
tttcatctcccctaatacatg

SEQ ID NO: 52354 - DNA, 20 bp, Artificial Sequence
  Synthetic: FXN 5 reverse 9:69036964-69036987; SpCas9
ttcatctcccctaatacatg

SEQ ID NO: 52355 - DNA, 19 bp, Artificial Sequence
  Synthetic: FXN 5 reverse 9:69036965-69036987; SpCas9
tcatctcccctaatacatg

SEQ ID NO: 52356 - DNA, 18 bp, Artificial Sequence
  Synthetic: FXN 5 reverse 9:69036966-69036987; SpCas9
catctcccctaatacatg

SEQ ID NO: 52357 - DNA, 25 bp, Artificial Sequence
  Synthetic: FXN 5 forward 9:69036962-69036990; SpCas9
catgtattaggggagatgaaagagg

SEQ ID NO: 52358 - DNA, 24 bp, Artificial Sequence
  Synthetic: FXN 5 forward 9:69036963-69036990; SpCas9
atgtattaggggagatgaaagagg

SEQ ID NO: 52359 - DNA, 23 bp, Artificial Sequence
  Synthetic: FXN 5 forward 9:69036964-69036990; SpCas9
tgtattaggggagatgaaagagg

SEQ ID NO: 52360 - DNA, 22 bp, Artificial Sequence
  Synthetic: FXN 5 forward 9:69036965-69036990; SpCas9
gtattaggggagatgaaagagg

SEQ ID NO: 52361 - DNA, 21 bp, Artificial Sequence
  Synthetic: FXN 5 forward 9:69036966-69036990; SpCas9
tattaggggagatgaaagagg

SEQ ID NO: 52362 - DNA, 20 bp, Artificial Sequence
  Synthetic: FXN 5 forward 9:69036967-69036990; SpCas9
attaggggagatgaaagagg

SEQ ID NO: 52363 - DNA, 19 bp, Artificial Sequence
  Synthetic: FXN 5 forward 9:69036968-69036990; SpCas9
ttaggggagatgaaagagg

SEQ ID NO: 52364 - DNA, 18 bp, Artificial Sequence
  Synthetic: FXN 5 forward 9:69036969-69036990; SpCas9
taggggagatgaaagagg

SEQ ID NO: 52365 - DNA, 25 bp, Artificial Sequence
  Synthetic: FXN 5 forward 9:69036963-69036991; SpCas9
atgtattaggggagatgaaagaggc

SEQ ID NO: 52366 - DNA, 24 bp, Artificial Sequence
  Synthetic: FXN 5 forward 9:69036964-69036991; SpCas9
tgtattaggggagatgaaagaggc

SEQ ID NO: 52367 - DNA, 23 bp, Artificial Sequence
  Synthetic: FXN 5 forward 9:69036965-69036991; SpCas9
gtattaggggagatgaaagaggc

SEQ ID NO: 52368 - DNA, 22 bp, Artificial Sequence
  Synthetic: FXN 5 forward 9:69036966-69036991; SpCas9
tattaggggagatgaaagaggc

SEQ ID NO: 52369 - DNA, 21 bp, Artificial Sequence
  Synthetic: FXN 5 forward 9:69036967-69036991; SpCas9
attaggggagatgaaagaggc

SEQ ID NO: 52370 - DNA, 20 bp, Artificial Sequence
  Synthetic: FXN 5 forward 9:69036968-69036991; SpCas9
ttaggggagatgaaagaggc

SEQ ID NO: 52371 - DNA, 19 bp, Artificial Sequence
  Synthetic: FXN 5 forward 9:69036969-69036991; SpCas9
taggggagatgaaagaggc

SEQ ID NO: 52372 - DNA, 18 bp, Artificial Sequence
  Synthetic: FXN 5 forward 9:69036970-69036991; SpCas9
aggggagatgaaagaggc

SEQ ID NO: 52373 - DNA, 25 bp, Artificial Sequence
  Synthetic: FXN 5 forward 9:69036974-69037002; SpCas9
gagatgaaagaggcaggccacgtcc

SEQ ID NO: 52374 - DNA, 24 bp, Artificial Sequence
  Synthetic: FXN 5 forward 9:69036975-69037002; SpCas9
agatgaaagaggcaggccacgtcc

SEQ ID NO: 52375 - DNA, 23 bp, Artificial Sequence
  Synthetic: FXN 5 forward 9:69036976-69037002; SpCas9
gatgaaagaggcaggccacgtcc

SEQ ID NO: 52376 - DNA, 22 bp, Artificial Sequence
  Synthetic: FXN 5 forward 9:69036977-69037002; SpCas9
atgaaagaggcaggccacgtcc

SEQ ID NO: 52377 - DNA, 21 bp, Artificial Sequence
  Synthetic: FXN 5 forward 9:69036978-69037002; SpCas9
tgaaagaggcaggccacgtcc

SEQ ID NO: 52378 - DNA, 20 bp, Artificial Sequence
  Synthetic: FXN 5 forward 9:69036979-69037002; SpCas9
gaaagaggcaggccacgtcc

SEQ ID NO: 52379 - DNA, 19 bp, Artificial Sequence
  Synthetic: FXN 5 forward 9:69036980-69037002; SpCas9
aaagaggcaggccacgtcc

SEQ ID NO: 52380 - DNA, 18 bp, Artificial Sequence
  Synthetic: FXN 5 forward 9:69036981-69037002; SpCas9
aagaggcaggccacgtcc

SEQ ID NO: 52381 - DNA, 25 bp, Artificial Sequence
  Synthetic: FXN 5 reverse 9:69036991-69037019; SpCas9
gagcaacacaaatatggcttggacg

SEQ ID NO: 52382 - DNA, 24 bp, Artificial Sequence
  Synthetic: FXN 5 reverse 9:69036992-69037019; SpCas9
agcaacacaaatatggcttggacg

SEQ ID NO: 52383 - DNA, 23 bp, Artificial Sequence
  Synthetic: FXN 5 reverse 9:69036993-69037019; SpCas9
gcaacacaaatatggcttggacg

SEQ ID NO: 52384 - DNA, 22 bp, Artificial Sequence
  Synthetic: FXN 5 reverse 9:69036994-69037019; SpCas9
caacacaaatatggcttggacg

SEQ ID NO: 52385 - DNA, 21 bp, Artificial Sequence
  Synthetic: FXN 5 reverse 9:69036995-69037019; SpCas9
aacacaaatatggcttggacg

SEQ ID NO: 52386 - DNA, 20 bp, Artificial Sequence
  Synthetic: FXN 5 reverse 9:69036996-69037019; SpCas9
acacaaatatggcttggacg

SEQ ID NO: 52387 - DNA, 19 bp, Artificial Sequence
  Synthetic: FXN 5 reverse 9:69036997-69037019; SpCas9
cacaaatatggcttggacg

SEQ ID NO: 52388 - DNA, 18 bp, Artificial Sequence
  Synthetic: FXN 5 reverse 9:69036998-69037019; SpCas9
acaaatatggcttggacg

SEQ ID NO: 52389 - DNA, 25 bp, Artificial Sequence
  Synthetic: FXN 5 forward 9:69036996-69037024; SpCas9
tccaagccatatttgtgttgctctc

SEQ ID NO: 52390 - DNA, 24 bp, Artificial Sequence
  Synthetic: FXN 5 forward 9:69036997-69037024; SpCas9
ccaagccatatttgtgttgctctc

SEQ ID NO: 52391 - DNA, 23 bp, Artificial Sequence
  Synthetic: FXN 5 forward 9:69036998-69037024; SpCas9
caagccatatttgtgttgctctc

SEQ ID NO: 52392 - DNA, 22 bp, Artificial Sequence
  Synthetic: FXN 5 forward 9:69036999-69037024; SpCas9
aagccatatttgtgttgctctc

SEQ ID NO: 52393 - DNA, 21 bp, Artificial Sequence
  Synthetic: FXN 5 forward 9:69037000-69037024; SpCas9
agccatatttgtgttgctctc

SEQ ID NO: 52394 - DNA, 20 bp, Artificial Sequence
  Synthetic: FXN 5 forward 9:69037001-69037024; SpCas9
gccatatttgtgttgctctc

SEQ ID NO: 52395 - DNA, 19 bp, Artificial Sequence
  Synthetic: FXN 5 forward 9:69037002-69037024; SpCas9
ccatatttgtgttgctctc

SEQ ID NO: 52396 - DNA, 18 bp, Artificial Sequence
  Synthetic: FXN 5 forward 9:69037003-69037024; SpCas9
catatttgtgttgctctc

SEQ ID NO: 52397 - DNA, 25 bp, Artificial Sequence
  Synthetic: FXN 5 reverse 9:69036997-69037025; SpCas9
tccggagagcaacacaaatatggct

SEQ ID NO: 52398 - DNA, 24 bp, Artificial Sequence
  Synthetic: FXN 5 reverse 9:69036998-69037025; SpCas9
ccggagagcaacacaaatatggct

SEQ ID NO: 52399 - DNA, 23 bp, Artificial Sequence
  Synthetic: FXN 5 reverse 9:69036999-69037025; SpCas9
cggagagcaacacaaatatggct

SEQ ID NO: 52400 - DNA, 22 bp, Artificial Sequence
  Synthetic: FXN 5 reverse 9:69037000-69037025; SpCas9
ggagagcaacacaaatatggct

SEQ ID NO: 52401 - DNA, 21 bp, Artificial Sequence
  Synthetic: FXN 5 reverse 9:69037001-69037025; SpCas9
gagagcaacacaaatatggct

SEQ ID NO: 52402 - DNA, 20 bp, Artificial Sequence
  Synthetic: FXN 5 reverse 9:69037002-69037025; SpCas9
agagcaacacaaatatggct

SEQ ID NO: 52403 - DNA, 19 bp, Artificial Sequence
  Synthetic: FXN 5 reverse 9:69037003-69037025; SpCas9
gagcaacacaaatatggct

SEQ ID NO: 52404 - DNA, 18 bp, Artificial Sequence
  Synthetic: FXN 5 reverse 9:69037004-69037025; SpCas9
agcaacacaaatatggct

SEQ ID NO: 52405 - DNA, 25 bp, Artificial Sequence
  Synthetic: FXN 5 forward 9:69036998-69037026; SpCas9
caagccatatttgtgttgctctccg

SEQ ID NO: 52406 - DNA, 24 bp, Artificial Sequence
  Synthetic: FXN 5 forward 9:69036999-69037026; SpCas9
aagccatatttgtgttgctctccg

SEQ ID NO: 52407 - DNA, 23 bp, Artificial Sequence
  Synthetic: FXN 5 forward 9:69037000-69037026; SpCas9
agccatatttgtgttgctctccg

SEQ ID NO: 52408 - DNA, 22 bp, Artificial Sequence
  Synthetic: FXN 5 forward 9:69037001-69037026; SpCas9
gccatatttgtgttgctctccg

SEQ ID NO: 52409 - DNA, 21 bp, Artificial Sequence
  Synthetic: FXN 5 forward 9:69037002-69037026; SpCas9
ccatatttgtgttgctctccg

SEQ ID NO: 52410 - DNA, 20 bp, Artificial Sequence
  Synthetic: FXN 5 forward 9:69037003-69037026; SpCas9
catatttgtgttgctctccg

SEQ ID NO: 52411 - DNA, 19 bp, Artificial Sequence
  Synthetic: FXN 5 forward 9:69037004-69037026; SpCas9
atatttgtgttgctctccg

SEQ ID NO: 52412 - DNA, 18 bp, Artificial Sequence
  Synthetic: FXN 5 forward 9:69037005-69037026; SpCas9
tatttgtgttgctctccg

SEQ ID NO: 52413 - DNA, 25 bp, Artificial Sequence
  Synthetic: FXN 5 reverse 9:69037002-69037030; SpCas9
caaactccggagagcaacacaaata

SEQ ID NO: 52414 - DNA, 24 bp, Artificial Sequence
  Synthetic: FXN 5 reverse 9:69037003-69037030; SpCas9
aaactccggagagcaacacaaata

SEQ ID NO: 52415 - DNA, 23 bp, Artificial Sequence
  Synthetic: FXN 5 reverse 9:69037004-69037030; SpCas9
aactccggagagcaacacaaata

SEQ ID NO: 52416 - DNA, 22 bp, Artificial Sequence
  Synthetic: FXN 5 reverse 9:69037005-69037030; SpCas9
actccggagagcaacacaaata

SEQ ID NO: 52417 - DNA, 21 bp, Artificial Sequence
  Synthetic: FXN 5 reverse 9:69037006-69037030; SpCas9
ctccggagagcaacacaaata

SEQ ID NO: 52418 - DNA, 20 bp, Artificial Sequence
  Synthetic: FXN 5 reverse 9:69037007-69037030; SpCas9
tccggagagcaacacaaata

SEQ ID NO: 52419 - DNA, 19 bp, Artificial Sequence
  Synthetic: FXN 5 reverse 9:69037008-69037030; SpCas9
ccggagagcaacacaaata

SEQ ID NO: 52420 - DNA, 18 bp, Artificial Sequence
  Synthetic: FXN 5 reverse 9:69037009-69037030; SpCas9
cggagagcaacacaaata

SEQ ID NO: 52421 - DNA, 25 bp, Artificial Sequence
  Synthetic: FXN 5 forward 9:69037010-69037038; SpCas9
gtgttgctctccggagtttgtactt

SEQ ID NO: 52422 - DNA, 24 bp, Artificial Sequence
  Synthetic: FXN 5 forward 9:69037011-69037038; SpCas9
tgttgctctccggagtttgtactt

SEQ ID NO: 52423 - DNA, 23 bp, Artificial Sequence
  Synthetic: FXN 5 forward 9:69037012-69037038; SpCas9
gttgctctccggagtttgtactt

SEQ ID NO: 52424 - DNA, 22 bp, Artificial Sequence
  Synthetic: FXN 5 forward 9:69037013-69037038; SpCas9
ttgctctccggagtttgtactt

SEQ ID NO: 52425 - DNA, 21 bp, Artificial Sequence
  Synthetic: FXN 5 forward 9:69037014-69037038; SpCas9
tgctctccggagtttgtactt

SEQ ID NO: 52426 - DNA, 20 bp, Artificial Sequence
  Synthetic: FXN 5 forward 9:69037015-69037038; SpCas9
gctctccggagtttgtactt

SEQ ID NO: 52427 - DNA, 19 bp, Artificial Sequence
  Synthetic: FXN 5 forward 9:69037016-69037038; SpCas9
ctctccggagtttgtactt

SEQ ID NO: 52428 - DNA, 18 bp, Artificial Sequence
  Synthetic: FXN 5 forward 9:69037017-69037038; SpCas9
tctccggagtttgtactt

SEQ ID NO: 52429 - DNA, 25 bp, Artificial Sequence
  Synthetic: FXN 5 forward 9:69037011-69037039; SpCas9
tgttgctctccggagtttgtacttt

SEQ ID NO: 52430 - DNA, 24 bp, Artificial Sequence
  Synthetic: FXN 5 forward 9:69037012-69037039; SpCas9
gttgctctccggagtttgtacttt

SEQ ID NO: 52431 - DNA, 23 bp, Artificial Sequence
  Synthetic: FXN 5 forward 9:69037013-69037039; SpCas9
ttgctctccggagtttgtacttt

SEQ ID NO: 52432 - DNA, 22 bp, Artificial Sequence
  Synthetic: FXN 5 forward 9:69037014-69037039; SpCas9
tgctctccggagtttgtacttt

SEQ ID NO: 52433 - DNA, 21 bp, Artificial Sequence
  Synthetic: FXN 5 forward 9:69037015-69037039; SpCas9
gctctccggagtttgtacttt

SEQ ID NO: 52434 - DNA, 20 bp, Artificial Sequence
  Synthetic: FXN 5 forward 9:69037016-69037039; SpCas9
ctctccggagtttgtacttt

SEQ ID NO: 52435 - DNA, 19 bp, Artificial Sequence
  Synthetic: FXN 5 forward 9:69037017-69037039; SpCas9
tctccggagtttgtacttt

SEQ ID NO: 52436 - DNA, 18 bp, Artificial Sequence
  Synthetic: FXN 5 forward 9:69037018-69037039; SpCas9
ctccggagtttgtacttt

SEQ ID NO: 52437 - DNA, 25 bp, Artificial Sequence
  Synthetic: FXN 5 reverse 9:69037016-69037044; SpCas9
tcaagcctaaagtacaaactccgga

SEQ ID NO: 52438 - DNA, 24 bp, Artificial Sequence
  Synthetic: FXN 5 reverse 9:69037017-69037044; SpCas9
caagcctaaagtacaaactccgga

SEQ ID NO: 52439 - DNA, 23 bp, Artificial Sequence
  Synthetic: FXN 5 reverse 9:69037018-69037044; SpCas9
aagcctaaagtacaaactccgga

SEQ ID NO: 52440 - DNA, 22 bp, Artificial Sequence
  Synthetic: FXN 5 reverse 9:69037019-69037044; SpCas9
agcctaaagtacaaactccgga

SEQ ID NO: 52441 - DNA, 21 bp, Artificial Sequence
  Synthetic: FXN 5 reverse 9:69037020-69037044; SpCas9
gcctaaagtacaaactccgga

SEQ ID NO: 52442 - DNA, 20 bp, Artificial Sequence
  Synthetic: FXN 5 reverse 9:69037021-69037044; SpCas9
cctaaagtacaaactccgga

SEQ ID NO: 52443 - DNA, 19 bp, Artificial Sequence
  Synthetic: FXN 5 reverse 9:69037022-69037044; SpCas9
ctaaagtacaaactccgga

SEQ ID NO: 52444 - DNA, 18 bp, Artificial Sequence
  Synthetic: FXN 5 reverse 9:69037023-69037044; SpCas9
taaagtacaaactccgga

SEQ ID NO: 52445 - DNA, 25 bp, Artificial Sequence
  Synthetic: FXN 5 reverse 9:69037018-69037046; SpCas9
gttcaagcctaaagtacaaactccg

SEQ ID NO: 52446 - DNA, 24 bp, Artificial Sequence
  Synthetic: FXN 5 reverse 9:69037019-69037046; SpCas9
ttcaagcctaaagtacaaactccg

SEQ ID NO: 52447 - DNA, 23 bp, Artificial Sequence
  Synthetic: FXN 5 reverse 9:69037020-69037046; SpCas9
tcaagcctaaagtacaaactccg

SEQ ID NO: 52448 - DNA, 22 bp, Artificial Sequence
  Synthetic: FXN 5 reverse 9:69037021-69037046; SpCas9
caagcctaaagtacaaactccg

SEQ ID NO: 52449 - DNA, 21 bp, Artificial Sequence
  Synthetic: FXN 5 reverse 9:69037022-69037046; SpCas9
aagcctaaagtacaaactccg

SEQ ID NO: 52450 - DNA, 20 bp, Artificial Sequence
  Synthetic: FXN 5 reverse 9:69037023-69037046; SpCas9
agcctaaagtacaaactccg

SEQ ID NO: 52451 - DNA, 19 bp, Artificial Sequence
  Synthetic: FXN 5 reverse 9:69037024-69037046; SpCas9
gcctaaagtacaaactccg

SEQ ID NO: 52452 - DNA, 18 bp, Artificial Sequence
  Synthetic: FXN 5 reverse 9:69037025-69037046; SpCas9
cctaaagtacaaactccg

SEQ ID NO: 52453 - DNA, 25 bp, Artificial Sequence
  Synthetic: FXN 5 reverse 9:69037020-69037048; SpCas9
aagttcaagcctaaagtacaaactc

SEQ ID NO: 52454 - DNA, 24 bp, Artificial Sequence
  Synthetic: FXN 5 reverse 9:69037021-69037048; SpCas9
agttcaagcctaaagtacaaactc

SEQ ID NO: 52455 - DNA, 23 bp, Artificial Sequence
  Synthetic: FXN 5 reverse 9:69037022-69037048; SpCas9
gttcaagcctaaagtacaaactc

SEQ ID NO: 52456 - DNA, 22 bp, Artificial Sequence
  Synthetic: FXN 5 reverse 9:69037023-69037048; SpCas9
ttcaagcctaaagtacaaactc

SEQ ID NO: 52457 - DNA, 21 bp, Artificial Sequence
  Synthetic: FXN 5 reverse 9:69037024-69037048; SpCas9
tcaagcctaaagtacaaactc

SEQ ID NO: 52458 - DNA, 20 bp, Artificial Sequence
  Synthetic: FXN 5 reverse 9:69037025-69037048; SpCas9
caagcctaaagtacaaactc

SEQ ID NO: 52459 - DNA, 19 bp, Artificial Sequence
  Synthetic: FXN 5 reverse 9:69037026-69037048; SpCas9
aagcctaaagtacaaactc

SEQ ID NO: 52460 - DNA, 18 bp, Artificial Sequence
  Synthetic: FXN 5 reverse 9:69037027-69037048; SpCas9
agcctaaagtacaaactc

SEQ ID NO: 52461 - DNA, 25 bp, Artificial Sequence
  Synthetic: FXN 5 reverse 9:69037032-69037060; SpCas9
aacacgtgtgggaagttcaagccta

SEQ ID NO: 52462 - DNA, 24 bp, Artificial Sequence
  Synthetic: FXN 5 reverse 9:69037033-69037060; SpCas9
acacgtgtgggaagttcaagccta

SEQ ID NO: 52463 - DNA, 23 bp, Artificial Sequence
  Synthetic: FXN 5 reverse 9:69037034-69037060; SpCas9
cacgtgtgggaagttcaagccta

SEQ ID NO: 52464 - DNA, 22 bp, Artificial Sequence
  Synthetic: FXN 5 reverse 9:69037035-69037060; SpCas9
acgtgtgggaagttcaagccta

SEQ ID NO: 52465 - DNA, 21 bp, Artificial Sequence
  Synthetic: FXN 5 reverse 9:69037036-69037060; SpCas9
cgtgtgggaagttcaagccta

SEQ ID NO: 52466 - DNA, 20 bp, Artificial Sequence
  Synthetic: FXN 5 reverse 9:69037037-69037060; SpCas9
gtgtgggaagttcaagccta

SEQ ID NO: 52467 - DNA, 19 bp, Artificial Sequence
  Synthetic: FXN 5 reverse 9:69037038-69037060; SpCas9
tgtgggaagttcaagccta

SEQ ID NO: 52468 - DNA, 18 bp, Artificial Sequence
  Synthetic: FXN 5 reverse 9:69037039-69037060; SpCas9
gtgggaagttcaagccta

SEQ ID NO: 52469 - DNA, 25 bp, Artificial Sequence
  Synthetic: FXN 5 forward 9:69037038-69037066; SpCas9
gcttgaacttcccacacgtgttatt

SEQ ID NO: 52470 - DNA, 24 bp, Artificial Sequence
  Synthetic: FXN 5 forward 9:69037039-69037066; SpCas9
cttgaacttcccacacgtgttatt

SEQ ID NO: 52471 - DNA, 23 bp, Artificial Sequence
  Synthetic: FXN 5 forward 9:69037040-69037066; SpCas9
ttgaacttcccacacgtgttatt

SEQ ID NO: 52472 - DNA, 22 bp, Artificial Sequence
  Synthetic: FXN 5 forward 9:69037041-69037066; SpCas9
tgaacttcccacacgtgttatt

SEQ ID NO: 52473 - DNA, 21 bp, Artificial Sequence
  Synthetic: FXN 5 forward 9:69037042-69037066; SpCas9
gaacttcccacacgtgttatt

SEQ ID NO: 52474 - DNA, 20 bp, Artificial Sequence
  Synthetic: FXN 5 forward 9:69037043-69037066; SpCas9
aacttcccacacgtgttatt

SEQ ID NO: 52475 - DNA, 19 bp, Artificial Sequence
  Synthetic: FXN 5 forward 9:69037044-69037066; SpCas9
acttcccacacgtgttatt

SEQ ID NO: 52476 - DNA, 18 bp, Artificial Sequence
  Synthetic: FXN 5 forward 9:69037045-69037066; SpCas9
cttcccacacgtgttatt

SEQ ID NO: 52477 - DNA, 25 bp, Artificial Sequence
  Synthetic: FXN 5 reverse 9:69037039-69037067; SpCas9
gccaaataacacgtgtgggaagttc

SEQ ID NO: 52478 - DNA, 24 bp, Artificial Sequence
  Synthetic: FXN 5 reverse 9:69037040-69037067; SpCas9
ccaaataacacgtgtgggaagttc

SEQ ID NO: 52479 - DNA, 23 bp, Artificial Sequence
  Synthetic: FXN 5 reverse 9:69037041-69037067; SpCas9
caaataacacgtgtgggaagttc

SEQ ID NO: 52480 - DNA, 22 bp, Artificial Sequence
  Synthetic: FXN 5 reverse 9:69037042-69037067; SpCas9
aaataacacgtgtgggaagttc

SEQ ID NO: 52481 - DNA, 21 bp, Artificial Sequence
  Synthetic: FXN 5 reverse 9:69037043-69037067; SpCas9
aataacacgtgtgggaagttc

SEQ ID NO: 52482 - DNA, 20 bp, Artificial Sequence
  Synthetic: FXN 5 reverse 9:69037044-69037067; SpCas9
ataacacgtgtgggaagttc

SEQ ID NO: 52483 - DNA, 19 bp, Artificial Sequence
  Synthetic: FXN 5 reverse 9:69037045-69037067; SpCas9
taacacgtgtgggaagttc

SEQ ID NO: 52484 - DNA, 18 bp, Artificial Sequence
  Synthetic: FXN 5 reverse 9:69037046-69037067; SpCas9
aacacgtgtgggaagttc

SEQ ID NO: 52485 - DNA, 25 bp, Artificial Sequence
  Synthetic: FXN 5 reverse 9:69037045-69037073; SpCas9
atgtgggccaaataacacgtgtggg

SEQ ID NO: 52486 - DNA, 24 bp, Artificial Sequence
  Synthetic: FXN 5 reverse 9:69037046-69037073; SpCas9
tgtgggccaaataacacgtgtggg

SEQ ID NO: 52487 - DNA, 23 bp, Artificial Sequence
  Synthetic: FXN 5 reverse 9:69037047-69037073; SpCas9
gtgggccaaataacacgtgtggg

SEQ ID NO: 52488 - DNA, 22 bp, Artificial Sequence
  Synthetic: FXN 5 reverse 9:69037048-69037073; SpCas9
tgggccaaataacacgtgtggg

SEQ ID NO: 52489 - DNA, 21 bp, Artificial Sequence
  Synthetic: FXN 5 reverse 9:69037049-69037073; SpCas9
gggccaaataacacgtgtggg

SEQ ID NO: 52490 - DNA, 20 bp, Artificial Sequence
  Synthetic: FXN 5 reverse 9:69037050-69037073; SpCas9
ggccaaataacacgtgtggg

SEQ ID NO: 52491 - DNA, 19 bp, Artificial Sequence
  Synthetic: FXN 5 reverse 9:69037051-69037073; SpCas9
gccaaataacacgtgtggg

SEQ ID NO: 52492 - DNA, 18 bp, Artificial Sequence
  Synthetic: FXN 5 reverse 9:69037052-69037073; SpCas9
ccaaataacacgtgtggg

SEQ ID NO: 52493 - DNA, 25 bp, Artificial Sequence
  Synthetic: FXN 5 reverse 9:69037048-69037076; SpCas9
acaatgtgggccaaataacacgtgt

SEQ ID NO: 52494 - DNA, 24 bp, Artificial Sequence
  Synthetic: FXN 5 reverse 9:69037049-69037076; SpCas9
caatgtgggccaaataacacgtgt

SEQ ID NO: 52495 - DNA, 23 bp, Artificial Sequence
  Synthetic: FXN 5 reverse 9:69037050-69037076; SpCas9
aatgtgggccaaataacacgtgt

SEQ ID NO: 52496 - DNA, 22 bp, Artificial Sequence
  Synthetic: FXN 5 reverse 9:69037051-69037076; SpCas9
atgtgggccaaataacacgtgt

SEQ ID NO: 52497 - DNA, 21 bp, Artificial Sequence
  Synthetic: FXN 5 reverse 9:69037052-69037076; SpCas9
tgtgggccaaataacacgtgt

SEQ ID NO: 52498 - DNA, 20 bp, Artificial Sequence
  Synthetic: FXN 5 reverse 9:69037053-69037076; SpCas9
gtgggccaaataacacgtgt

SEQ ID NO: 52499 - DNA, 19 bp, Artificial Sequence
  Synthetic: FXN 5 reverse 9:69037054-69037076; SpCas9
tgggccaaataacacgtgt

SEQ ID NO: 52500 - DNA, 18 bp, Artificial Sequence
  Synthetic: FXN 5 reverse 9:69037055-69037076; SpCas9
gggccaaataacacgtgt

SEQ ID NO: 52501 - DNA, 25 bp, Artificial Sequence
  Synthetic: FXN 5 reverse 9:69037049-69037077; SpCas9
cacaatgtgggccaaataacacgtg

SEQ ID NO: 52502 - DNA, 24 bp, Artificial Sequence
  Synthetic: FXN 5 reverse 9:69037050-69037077; SpCas9
acaatgtgggccaaataacacgtg

SEQ ID NO: 52503 - DNA, 23 bp, Artificial Sequence
  Synthetic: FXN 5 reverse 9:69037051-69037077; SpCas9
caatgtgggccaaataacacgtg

SEQ ID NO: 52504 - DNA, 22 bp, Artificial Sequence
  Synthetic: FXN 5 reverse 9:69037052-69037077; SpCas9
aatgtgggccaaataacacgtg

SEQ ID NO: 52505 - DNA, 21 bp, Artificial Sequence
  Synthetic: FXN 5 reverse 9:69037053-69037077; SpCas9
atgtgggccaaataacacgtg

SEQ ID NO: 52506 - DNA, 20 bp, Artificial Sequence
  Synthetic: FXN 5 reverse 9:69037054-69037077; SpCas9
tgtgggccaaataacacgtg

SEQ ID NO: 52507 - DNA, 19 bp, Artificial Sequence
  Synthetic: FXN 5 reverse 9:69037055-69037077; SpCas9
gtgggccaaataacacgtg

SEQ ID NO: 52508 - DNA, 18 bp, Artificial Sequence
  Synthetic: FXN 5 reverse 9:69037056-69037077; SpCas9
tgggccaaataacacgtg

SEQ ID NO: 52509 - DNA, 25 bp, Artificial Sequence
  Synthetic: FXN 5 forward 9:69037056-69037084; SpCas9
tgttatttggcccacattgtgtttg

SEQ ID NO: 52510 - DNA, 24 bp, Artificial Sequence
  Synthetic: FXN 5 forward 9:69037057-69037084; SpCas9
gttatttggcccacattgtgtttg

SEQ ID NO: 52511 - DNA, 23 bp, Artificial Sequence
  Synthetic: FXN 5 forward 9:69037058-69037084; SpCas9
ttatttggcccacattgtgtttg

SEQ ID NO: 52512 - DNA, 22 bp, Artificial Sequence
  Synthetic: FXN 5 forward 9:69037059-69037084; SpCas9
tatttggcccacattgtgtttg

SEQ ID NO: 52513 - DNA, 21 bp, Artificial Sequence
  Synthetic: FXN 5 forward 9:69037060-69037084; SpCas9
atttggcccacattgtgtttg

SEQ ID NO: 52514 - DNA, 20 bp, Artificial Sequence
  Synthetic: FXN 5 forward 9:69037061-69037084; SpCas9
tttggcccacattgtgtttg

SEQ ID NO: 52515 - DNA, 19 bp, Artificial Sequence
  Synthetic: FXN 5 forward 9:69037062-69037084; SpCas9
ttggcccacattgtgtttg

SEQ ID NO: 52516 - DNA, 18 bp, Artificial Sequence
  Synthetic: FXN 5 forward 9:69037063-69037084; SpCas9
tggcccacattgtgtttg

SEQ ID NO: 52517 - DNA, 25 bp, Artificial Sequence
  Synthetic: FXN 5 forward 9:69037065-69037093; SpCas9
gcccacattgtgtttgaagaaactt

SEQ ID NO: 52518 - DNA, 24 bp, Artificial Sequence
  Synthetic: FXN 5 forward 9:69037066-69037093; SpCas9
cccacattgtgtttgaagaaactt

SEQ ID NO: 52519 - DNA, 23 bp, Artificial Sequence
  Synthetic: FXN 5 forward 9:69037067-69037093; SpCas9
ccacattgtgtttgaagaaactt

SEQ ID NO: 52520 - DNA, 22 bp, Artificial Sequence
  Synthetic: FXN 5 forward 9:69037068-69037093; SpCas9
cacattgtgtttgaagaaactt

SEQ ID NO: 52521 - DNA, 21 bp, Artificial Sequence
  Synthetic: FXN 5 forward 9:69037069-69037093; SpCas9
acattgtgtttgaagaaactt

SEQ ID NO: 52522 - DNA, 20 bp, Artificial Sequence
  Synthetic: FXN 5 forward 9:69037070-69037093; SpCas9
cattgtgtttgaagaaactt

SEQ ID NO: 52523 - DNA, 19 bp, Artificial Sequence
  Synthetic: FXN 5 forward 9:69037071-69037093; SpCas9
attgtgtttgaagaaactt

SEQ ID NO: 52524 - DNA, 18 bp, Artificial Sequence
  Synthetic: FXN 5 forward 9:69037072-69037093; SpCas9
ttgtgtttgaagaaactt

SEQ ID NO: 52525 - DNA, 25 bp, Artificial Sequence
  Synthetic: FXN 5 forward 9:69037066-69037094; SpCas9
cccacattgtgtttgaagaaacttt

SEQ ID NO: 52526 - DNA, 24 bp, Artificial Sequence
  Synthetic: FXN 5 forward 9:69037067-69037094; SpCas9
ccacattgtgtttgaagaaacttt

SEQ ID NO: 52527 - DNA, 23 bp, Artificial Sequence
  Synthetic: FXN 5 forward 9:69037068-69037094; SpCas9
cacattgtgtttgaagaaacttt

SEQ ID NO: 52528 - DNA, 22 bp, Artificial Sequence
  Synthetic: FXN 5 forward 9:69037069-69037094; SpCas9
acattgtgtttgaagaaacttt

SEQ ID NO: 52529 - DNA, 21 bp, Artificial Sequence
  Synthetic: FXN 5 forward 9:69037070-69037094; SpCas9
cattgtgtttgaagaaacttt

SEQ ID NO: 52530 - DNA, 20 bp, Artificial Sequence
  Synthetic: FXN 5 forward 9:69037071-69037094; SpCas9
attgtgtttgaagaaacttt

SEQ ID NO: 52531 - DNA, 19 bp, Artificial Sequence
  Synthetic: FXN 5 forward 9:69037072-69037094; SpCas9
ttgtgtttgaagaaacttt

SEQ ID NO: 52532 - DNA, 18 bp, Artificial Sequence
  Synthetic: FXN 5 forward 9:69037073-69037094; SpCas9
tgtgtttgaagaaacttt

SEQ ID NO: 52533 - DNA, 25 bp, Artificial Sequence
  Synthetic: FXN 5 reverse 9:69037066-69037094; SpCas9
cccaaagtttcttcaaacacaatgt

SEQ ID NO: 52534 - DNA, 24 bp, Artificial Sequence
  Synthetic: FXN 5 reverse 9:69037067-69037094; SpCas9
ccaaagtttcttcaaacacaatgt

SEQ ID NO: 52535 - DNA, 23 bp, Artificial Sequence
  Synthetic: FXN 5 reverse 9:69037068-69037094; SpCas9
caaagtttcttcaaacacaatgt

SEQ ID NO: 52536 - DNA, 22 bp, Artificial Sequence
  Synthetic: FXN 5 reverse 9:69037069-69037094; SpCas9
aaagtttcttcaaacacaatgt

SEQ ID NO: 52537 - DNA, 21 bp, Artificial Sequence
  Synthetic: FXN 5 reverse 9:69037070-69037094; SpCas9
aagtttcttcaaacacaatgt

SEQ ID NO: 52538 - DNA, 20 bp, Artificial Sequence
  Synthetic: FXN 5 reverse 9:69037071-69037094; SpCas9
agtttcttcaaacacaatgt

SEQ ID NO: 52539 - DNA, 19 bp, Artificial Sequence
  Synthetic: FXN 5 reverse 9:69037072-69037094; SpCas9
gtttcttcaaacacaatgt

SEQ ID NO: 52540 - DNA, 18 bp, Artificial Sequence
  Synthetic: FXN 5 reverse 9:69037073-69037094; SpCas9
tttcttcaaacacaatgt

SEQ ID NO: 52541 - DNA, 25 bp, Artificial Sequence
  Synthetic: FXN 5 reverse 9:69037067-69037095; SpCas9
tcccaaagtttcttcaaacacaatg

SEQ ID NO: 52542 - DNA, 24 bp, Artificial Sequence
  Synthetic: FXN 5 reverse 9:69037068-69037095; SpCas9
cccaaagtttcttcaaacacaatg

SEQ ID NO: 52543 - DNA, 23 bp, Artificial Sequence
  Synthetic: FXN 5 reverse 9:69037069-69037095; SpCas9
ccaaagtttcttcaaacacaatg

SEQ ID NO: 52544 - DNA, 22 bp, Artificial Sequence
  Synthetic: FXN 5 reverse 9:69037070-69037095; SpCas9
caaagtttcttcaaacacaatg

SEQ ID NO: 52545 - DNA, 21 bp, Artificial Sequence
  Synthetic: FXN 5 reverse 9:69037071-69037095; SpCas9
aaagtttcttcaaacacaatg

SEQ ID NO: 52546 - DNA, 20 bp, Artificial Sequence
  Synthetic: FXN 5 reverse 9:69037072-69037095; SpCas9
aagtttcttcaaacacaatg

SEQ ID NO: 52547 - DNA, 19 bp, Artificial Sequence
  Synthetic: FXN 5 reverse 9:69037073-69037095; SpCas9
agtttcttcaaacacaatg

SEQ ID NO: 52548 - DNA, 18 bp, Artificial Sequence
  Synthetic: FXN 5 reverse 9:69037074-69037095; SpCas9
gtttcttcaaacacaatg

SEQ ID NO: 52549 - DNA, 25 bp, Artificial Sequence
  Synthetic: FXN 5 forward 9:69037071-69037099; SpCas9
attgtgtttgaagaaactttgggat

SEQ ID NO: 52550 - DNA, 24 bp, Artificial Sequence
  Synthetic: FXN 5 forward 9:69037072-69037099; SpCas9
ttgtgtttgaagaaactttgggat

SEQ ID NO: 52551 - DNA, 23 bp, Artificial Sequence
  Synthetic: FXN 5 forward 9:69037073-69037099; SpCas9
tgtgtttgaagaaactttgggat

SEQ ID NO: 52552 - DNA, 22 bp, Artificial Sequence
  Synthetic: FXN 5 forward 9:69037074-69037099; SpCas9
gtgtttgaagaaactttgggat

SEQ ID NO: 52553 - DNA, 21 bp, Artificial Sequence
  Synthetic: FXN 5 forward 9:69037075-69037099; SpCas9
tgtttgaagaaactttgggat

SEQ ID NO: 52554 - DNA, 20 bp, Artificial Sequence
  Synthetic: FXN 5 forward 9:69037076-69037099; SpCas9
gtttgaagaaactttgggat

SEQ ID NO: 52555 - DNA, 19 bp, Artificial Sequence
  Synthetic: FXN 5 forward 9:69037077-69037099; SpCas9
tttgaagaaactttgggat

SEQ ID NO: 52556 - DNA, 18 bp, Artificial Sequence
  Synthetic: FXN 5 forward 9:69037078-69037099; SpCas9
ttgaagaaactttgggat

SEQ ID NO: 52557 - DNA, 25 bp, Artificial Sequence
  Synthetic: FXN 5 forward 9:69037078-69037106; SpCas9
ttgaagaaactttgggattggttgc

SEQ ID NO: 52558 - DNA, 24 bp, Artificial Sequence
  Synthetic: FXN 5 forward 9:69037079-69037106; SpCas9
tgaagaaactttgggattggttgc

SEQ ID NO: 52559 - DNA, 23 bp, Artificial Sequence
  Synthetic: FXN 5 forward 9:69037080-69037106; SpCas9
gaagaaactttgggattggttgc

SEQ ID NO: 52560 - DNA, 22 bp, Artificial Sequence
  Synthetic: FXN 5 forward 9:69037081-69037106; SpCas9
aagaaactttgggattggttgc

SEQ ID NO: 52561 - DNA, 21 bp, Artificial Sequence
  Synthetic: FXN 5 forward 9:69037082-69037106; SpCas9
agaaactttgggattggttgc

SEQ ID NO: 52562 - DNA, 20 bp, Artificial Sequence
  Synthetic: FXN 5 forward 9:69037083-69037106; SpCas9
gaaactttgggattggttgc

SEQ ID NO: 52563 - DNA, 19 bp, Artificial Sequence
  Synthetic: FXN 5 forward 9:69037084-69037106; SpCas9
aaactttgggattggttgc

SEQ ID NO: 52564 - DNA, 18 bp, Artificial Sequence
  Synthetic: FXN 5 forward 9:69037085-69037106; SpCas9
aactttgggattggttgc

SEQ ID NO: 52565 - DNA, 25 bp, Artificial Sequence
  Synthetic: FXN 5 reverse 9:69037087-69037115; SpCas9
ttttaagcactggcaaccaatccca

SEQ ID NO: 52566 - DNA, 24 bp, Artificial Sequence
  Synthetic: FXN 5 reverse 9:69037088-69037115; SpCas9
tttaagcactggcaaccaatccca

SEQ ID NO: 52567 - DNA, 23 bp, Artificial Sequence
  Synthetic: FXN 5 reverse 9:69037089-69037115; SpCas9
ttaagcactggcaaccaatccca

SEQ ID NO: 52568 - DNA, 22 bp, Artificial Sequence
  Synthetic: FXN 5 reverse 9:69037090-69037115; SpCas9
taagcactggcaaccaatccca

SEQ ID NO: 52569 - DNA, 21 bp, Artificial Sequence
  Synthetic: FXN 5 reverse 9:69037091-69037115; SpCas9
aagcactggcaaccaatccca

SEQ ID NO: 52570 - DNA, 20 bp, Artificial Sequence
  Synthetic: FXN 5 reverse 9:69037092-69037115; SpCas9
agcactggcaaccaatccca

SEQ ID NO: 52571 - DNA, 19 bp, Artificial Sequence
  Synthetic: FXN 5 reverse 9:69037093-69037115; SpCas9
gcactggcaaccaatccca

SEQ ID NO: 52572 - DNA, 18 bp, Artificial Sequence
  Synthetic: FXN 5 reverse 9:69037094-69037115; SpCas9
cactggcaaccaatccca

SEQ ID NO: 52573 - DNA, 25 bp, Artificial Sequence
  Synthetic: FXN 5 forward 9:69037088-69037116; SpCas9
tttgggattggttgccagtgcttaa

SEQ ID NO: 52574 - DNA, 24 bp, Artificial Sequence
  Synthetic: FXN 5 forward 9:69037089-69037116; SpCas9
ttgggattggttgccagtgcttaa

SEQ ID NO: 52575 - DNA, 23 bp, Artificial Sequence
  Synthetic: FXN 5 forward 9:69037090-69037116; SpCas9
tgggattggttgccagtgcttaa

SEQ ID NO: 52576 - DNA, 22 bp, Artificial Sequence
  Synthetic: FXN 5 forward 9:69037091-69037116; SpCas9
gggattggttgccagtgcttaa

SEQ ID NO: 52577 - DNA, 21 bp, Artificial Sequence
  Synthetic: FXN 5 forward 9:69037092-69037116; SpCas9
ggattggttgccagtgcttaa

SEQ ID NO: 52578 - DNA, 20 bp, Artificial Sequence
  Synthetic: FXN 5 forward 9:69037093-69037116; SpCas9
gattggttgccagtgcttaa

SEQ ID NO: 52579 - DNA, 19 bp, Artificial Sequence
  Synthetic: FXN 5 forward 9:69037094-69037116; SpCas9
attggttgccagtgcttaa

SEQ ID NO: 52580 - DNA, 18 bp, Artificial Sequence
  Synthetic: FXN 5 forward 9:69037095-69037116; SpCas9
ttggttgccagtgcttaa

SEQ ID NO: 52581 - DNA, 25 bp, Artificial Sequence
  Synthetic: FXN 5 forward 9:69037092-69037120; SpCas9
ggattggttgccagtgcttaaaagt

SEQ ID NO: 52582 - DNA, 24 bp, Artificial Sequence
  Synthetic: FXN 5 forward 9:69037093-69037120; SpCas9
gattggttgccagtgcttaaaagt

SEQ ID NO: 52583 - DNA, 23 bp, Artificial Sequence
  Synthetic: FXN 5 forward 9:69037094-69037120; SpCas9
attggttgccagtgcttaaaagt

SEQ ID NO: 52584 - DNA, 22 bp, Artificial Sequence
  Synthetic: FXN 5 forward 9:69037095-69037120; SpCas9
ttggttgccagtgcttaaaagt

SEQ ID NO: 52585 - DNA, 21 bp, Artificial Sequence
  Synthetic: FXN 5 forward 9:69037096-69037120; SpCas9
tggttgccagtgcttaaaagt

SEQ ID NO: 52586 - DNA, 20 bp, Artificial Sequence
  Synthetic: FXN 5 forward 9:69037097-69037120; SpCas9
ggttgccagtgcttaaaagt

SEQ ID NO: 52587 - DNA, 19 bp, Artificial Sequence
  Synthetic: FXN 5 forward 9:69037098-69037120; SpCas9
gttgccagtgcttaaaagt

SEQ ID NO: 52588 - DNA, 18 bp, Artificial Sequence
  Synthetic: FXN 5 forward 9:69037099-69037120; SpCas9
ttgccagtgcttaaaagt

SEQ ID NO: 52589 - DNA, 25 bp, Artificial Sequence
  Synthetic: FXN 5 forward 9:69037093-69037121; SpCas9
gattggttgccagtgcttaaaagtt

SEQ ID NO: 52590 - DNA, 24 bp, Artificial Sequence
  Synthetic: FXN 5 forward 9:69037094-69037121; SpCas9
attggttgccagtgcttaaaagtt

SEQ ID NO: 52591 - DNA, 23 bp, Artificial Sequence
  Synthetic: FXN 5 forward 9:69037095-69037121; SpCas9
ttggttgccagtgcttaaaagtt

SEQ ID NO: 52592 - DNA, 22 bp, Artificial Sequence
  Synthetic: FXN 5 forward 9:69037096-69037121; SpCas9
tggttgccagtgcttaaaagtt

SEQ ID NO: 52593 - DNA, 21 bp, Artificial Sequence
  Synthetic: FXN 5 forward 9:69037097-69037121; SpCas9
ggttgccagtgcttaaaagtt

SEQ ID NO: 52594 - DNA, 20 bp, Artificial Sequence
  Synthetic: FXN 5 forward 9:69037098-69037121; SpCas9
gttgccagtgcttaaaagtt

SEQ ID NO: 52595 - DNA, 19 bp, Artificial Sequence
  Synthetic: FXN 5 forward 9:69037099-69037121; SpCas9
ttgccagtgcttaaaagtt

SEQ ID NO: 52596 - DNA, 18 bp, Artificial Sequence
  Synthetic: FXN 5 forward 9:69037100-69037121; SpCas9
tgccagtgcttaaaagtt

SEQ ID NO: 52597 - DNA, 25 bp, Artificial Sequence
  Synthetic: FXN 5 forward 9:69037099-69037127; SpCas9
ttgccagtgcttaaaagttaggact

SEQ ID NO: 52598 - DNA, 24 bp, Artificial Sequence
  Synthetic: FXN 5 forward 9:69037100-69037127; SpCas9
tgccagtgcttaaaagttaggact

SEQ ID NO: 52599 - DNA, 23 bp, Artificial Sequence
  Synthetic: FXN 5 forward 9:69037101-69037127; SpCas9
gccagtgcttaaaagttaggact

SEQ ID NO: 52600 - DNA, 22 bp, Artificial Sequence
  Synthetic: FXN 5 forward 9:69037102-69037127; SpCas9
ccagtgcttaaaagttaggact

SEQ ID NO: 52601 - DNA, 21 bp, Artificial Sequence
  Synthetic: FXN 5 forward 9:69037103-69037127; SpCas9
cagtgcttaaaagttaggact

SEQ ID NO: 52602 - DNA, 20 bp, Artificial Sequence
  Synthetic: FXN 5 forward 9:69037104-69037127; SpCas9
agtgcttaaaagttaggact

SEQ ID NO: 52603 - DNA, 19 bp, Artificial Sequence
  Synthetic: FXN 5 forward 9:69037105-69037127; SpCas9
gtgcttaaaagttaggact

SEQ ID NO: 52604 - DNA, 18 bp, Artificial Sequence
  Synthetic: FXN 5 forward 9:69037106-69037127; SpCas9
tgcttaaaagttaggact

SEQ ID NO: 52605 - DNA, 25 bp, Artificial Sequence
  Synthetic: FXN 5 reverse 9:69037102-69037130; SpCas9
tttctaagtcctaacttttaagcac

SEQ ID NO: 52606 - DNA, 24 bp, Artificial Sequence
  Synthetic: FXN 5 reverse 9:69037103-69037130; SpCas9
ttctaagtcctaacttttaagcac

SEQ ID NO: 52607 - DNA, 23 bp, Artificial Sequence
  Synthetic: FXN 5 reverse 9:69037104-69037130; SpCas9
tctaagtcctaacttttaagcac

SEQ ID NO: 52608 - DNA, 22 bp, Artificial Sequence
  Synthetic: FXN 5 reverse 9:69037105-69037130; SpCas9
ctaagtcctaacttttaagcac

SEQ ID NO: 52609 - DNA, 21 bp, Artificial Sequence
  Synthetic: FXN 5 reverse 9:69037106-69037130; SpCas9
taagtcctaacttttaagcac

SEQ ID NO: 52610 - DNA, 20 bp, Artificial Sequence
  Synthetic: FXN 5 reverse 9:69037107-69037130; SpCas9
aagtcctaacttttaagcac

SEQ ID NO: 52611 - DNA, 19 bp, Artificial Sequence
  Synthetic: FXN 5 reverse 9:69037108-69037130; SpCas9
agtcctaacttttaagcac

SEQ ID NO: 52612 - DNA, 18 bp, Artificial Sequence
  Synthetic: FXN 5 reverse 9:69037109-69037130; SpCas9
gtcctaacttttaagcac

SEQ ID NO: 52613 - DNA, 25 bp, Artificial Sequence
  Synthetic: FXN 5 forward 9:69037106-69037134; SpCas9
tgcttaaaagttaggacttagaaaa

SEQ ID NO: 52614 - DNA, 24 bp, Artificial Sequence
  Synthetic: FXN 5 forward 9:69037107-69037134; SpCas9
gcttaaaagttaggacttagaaaa

SEQ ID NO: 52615 - DNA, 23 bp, Artificial Sequence
  Synthetic: FXN 5 forward 9:69037108-69037134; SpCas9
cttaaaagttaggacttagaaaa

SEQ ID NO: 52616 - DNA, 22 bp, Artificial Sequence
  Synthetic: FXN 5 forward 9:69037109-69037134; SpCas9
ttaaaagttaggacttagaaaa

SEQ ID NO: 52617 - DNA, 21 bp, Artificial Sequence
  Synthetic: FXN 5 forward 9:69037110-69037134; SpCas9
taaaagttaggacttagaaaa

SEQ ID NO: 52618 - DNA, 20 bp, Artificial Sequence
  Synthetic: FXN 5 forward 9:69037111-69037134; SpCas9
aaaagttaggacttagaaaa

SEQ ID NO: 52619 - DNA, 19 bp, Artificial Sequence
  Synthetic: FXN 5 forward 9:69037112-69037134; SpCas9
aaagttaggacttagaaaa

SEQ ID NO: 52620 - DNA, 18 bp, Artificial Sequence
  Synthetic: FXN 5 forward 9:69037113-69037134; SpCas9
aagttaggacttagaaaa

SEQ ID NO: 52621 - DNA, 25 bp, Artificial Sequence
  Synthetic: FXN 5 reverse 9:69037108-69037136; SpCas9
atccattttctaagtcctaactttt

SEQ ID NO: 52622 - DNA, 24 bp, Artificial Sequence
  Synthetic: FXN 5 reverse 9:69037109-69037136; SpCas9
tccattttctaagtcctaactttt

SEQ ID NO: 52623 - DNA, 23 bp, Artificial Sequence
  Synthetic: FXN 5 reverse 9:69037110-69037136; SpCas9
ccattttctaagtcctaactttt

SEQ ID NO: 52624 - DNA, 22 bp, Artificial Sequence
  Synthetic: FXN 5 reverse 9:69037111-69037136; SpCas9
cattttctaagtcctaactttt

SEQ ID NO: 52625 - DNA, 21 bp, Artificial Sequence
  Synthetic: FXN 5 reverse 9:69037112-69037136; SpCas9
attttctaagtcctaactttt

SEQ ID NO: 52626 - DNA, 20 bp, Artificial Sequence
  Synthetic: FXN 5 reverse 9:69037113-69037136; SpCas9
ttttctaagtcctaactttt

SEQ ID NO: 52627 - DNA, 19 bp, Artificial Sequence
  Synthetic: FXN 5 reverse 9:69037114-69037136; SpCas9
tttctaagtcctaactttt

SEQ ID NO: 52628 - DNA, 18 bp, Artificial Sequence
  Synthetic: FXN 5 reverse 9:69037115-69037136; SpCas9
ttctaagtcctaactttt

SEQ ID NO: 52629 - DNA, 25 bp, Artificial Sequence
  Synthetic: FXN 5 forward 9:69037115-69037143; SpCas9
gttaggacttagaaaatggatttcc

SEQ ID NO: 52630 - DNA, 24 bp, Artificial Sequence
  Synthetic: FXN 5 forward 9:69037116-69037143; SpCas9
ttaggacttagaaaatggatttcc

SEQ ID NO: 52631 - DNA, 23 bp, Artificial Sequence
  Synthetic: FXN 5 forward 9:69037117-69037143; SpCas9
taggacttagaaaatggatttcc

SEQ ID NO: 52632 - DNA, 22 bp, Artificial Sequence
  Synthetic: FXN 5 forward 9:69037118-69037143; SpCas9
aggacttagaaaatggatttcc

SEQ ID NO: 52633 - DNA, 21 bp, Artificial Sequence
  Synthetic: FXN 5 forward 9:69037119-69037143; SpCas9
ggacttagaaaatggatttcc

SEQ ID NO: 52634 - DNA, 20 bp, Artificial Sequence
  Synthetic: FXN 5 forward 9:69037120-69037143; SpCas9
gacttagaaaatggatttcc

SEQ ID NO: 52635 - DNA, 19 bp, Artificial Sequence
  Synthetic: FXN 5 forward 9:69037121-69037143; SpCas9
acttagaaaatggatttcc

SEQ ID NO: 52636 - DNA, 18 bp, Artificial Sequence
  Synthetic: FXN 5 forward 9:69037122-69037143; SpCas9
cttagaaaatggatttcc

SEQ ID NO: 52637 - DNA, 25 bp, Artificial Sequence
  Synthetic: FXN 5 forward 9:69037118-69037146; SpCas9
aggacttagaaaatggatttcctgg

SEQ ID NO: 52638 - DNA, 24 bp, Artificial Sequence
  Synthetic: FXN 5 forward 9:69037119-69037146; SpCas9
ggacttagaaaatggatttcctgg

SEQ ID NO: 52639 - DNA, 23 bp, Artificial Sequence
  Synthetic: FXN 5 forward 9:69037120-69037146; SpCas9
gacttagaaaatggatttcctgg

SEQ ID NO: 52640 - DNA, 22 bp, Artificial Sequence
  Synthetic: FXN 5 forward 9:69037121-69037146; SpCas9
acttagaaaatggatttcctgg

SEQ ID NO: 52641 - DNA, 21 bp, Artificial Sequence
  Synthetic: FXN 5 forward 9:69037122-69037146; SpCas9
cttagaaaatggatttcctgg

SEQ ID NO: 52642 - DNA, 20 bp, Artificial Sequence
  Synthetic: FXN 5 forward 9:69037123-69037146; SpCas9
ttagaaaatggatttcctgg

SEQ ID NO: 52643 - DNA, 19 bp, Artificial Sequence
  Synthetic: FXN 5 forward 9:69037124-69037146; SpCas9
tagaaaatggatttcctgg

SEQ ID NO: 52644 - DNA, 18 bp, Artificial Sequence
  Synthetic: FXN 5 forward 9:69037125-69037146; SpCas9
agaaaatggatttcctgg

SEQ ID NO: 52645 - DNA, 25 bp, Artificial Sequence
  Synthetic: FXN 5 forward 9:69037119-69037147; SpCas9
ggacttagaaaatggatttcctggc

SEQ ID NO: 52646 - DNA, 24 bp, Artificial Sequence
  Synthetic: FXN 5 forward 9:69037120-69037147; SpCas9
gacttagaaaatggatttcctggc

SEQ ID NO: 52647 - DNA, 23 bp, Artificial Sequence
  Synthetic: FXN 5 forward 9:69037121-69037147; SpCas9
acttagaaaatggatttcctggc

SEQ ID NO: 52648 - DNA, 22 bp, Artificial Sequence
  Synthetic: FXN 5 forward 9:69037122-69037147; SpCas9
cttagaaaatggatttcctggc

SEQ ID NO: 52649 - DNA, 21 bp, Artificial Sequence
  Synthetic: FXN 5 forward 9:69037123-69037147; SpCas9
ttagaaaatggatttcctggc

SEQ ID NO: 52650 - DNA, 20 bp, Artificial Sequence
  Synthetic: FXN 5 forward 9:69037124-69037147; SpCas9
tagaaaatggatttcctggc

SEQ ID NO: 52651 - DNA, 19 bp, Artificial Sequence
  Synthetic: FXN 5 forward 9:69037125-69037147; SpCas9
agaaaatggatttcctggc

SEQ ID NO: 52652 - DNA, 18 bp, Artificial Sequence
  Synthetic: FXN 5 forward 9:69037126-69037147; SpCas9
gaaaatggatttcctggc

SEQ ID NO: 52653 - DNA, 25 bp, Artificial Sequence
  Synthetic: FXN 5 reverse 9:69037122-69037150; SpCas9
cgtcctgccaggaaatccattttct

SEQ ID NO: 52654 - DNA, 24 bp, Artificial Sequence
  Synthetic: FXN 5 reverse 9:69037123-69037150; SpCas9
gtcctgccaggaaatccattttct

SEQ ID NO: 52655 - DNA, 23 bp, Artificial Sequence
  Synthetic: FXN 5 reverse 9:69037124-69037150; SpCas9
tcctgccaggaaatccattttct

SEQ ID NO: 52656 - DNA, 22 bp, Artificial Sequence
  Synthetic: FXN 5 reverse 9:69037125-69037150; SpCas9
cctgccaggaaatccattttct

SEQ ID NO: 52657 - DNA, 21 bp, Artificial Sequence
  Synthetic: FXN 5 reverse 9:69037126-69037150; SpCas9
ctgccaggaaatccattttct

SEQ ID NO: 52658 - DNA, 20 bp, Artificial Sequence
  Synthetic: FXN 5 reverse 9:69037127-69037150; SpCas9
tgccaggaaatccattttct

SEQ ID NO: 52659 - DNA, 19 bp, Artificial Sequence
  Synthetic: FXN 5 reverse 9:69037128-69037150; SpCas9
gccaggaaatccattttct

SEQ ID NO: 52660 - DNA, 18 bp, Artificial Sequence
  Synthetic: FXN 5 reverse 9:69037129-69037150; SpCas9
ccaggaaatccattttct

SEQ ID NO: 52661 - DNA, 25 bp, Artificial Sequence
  Synthetic: FXN 5 forward 9:69037125-69037153; SpCas9
agaaaatggatttcctggcaggacg

SEQ ID NO: 52662 - DNA, 24 bp, Artificial Sequence
  Synthetic: FXN 5 forward 9:69037126-69037153; SpCas9
gaaaatggatttcctggcaggacg

SEQ ID NO: 52663 - DNA, 23 bp, Artificial Sequence
  Synthetic: FXN 5 forward 9:69037127-69037153; SpCas9
aaaatggatttcctggcaggacg

SEQ ID NO: 52664 - DNA, 22 bp, Artificial Sequence
  Synthetic: FXN 5 forward 9:69037128-69037153; SpCas9
aaatggatttcctggcaggacg

SEQ ID NO: 52665 - DNA, 21 bp, Artificial Sequence
  Synthetic: FXN 5 forward 9:69037129-69037153; SpCas9
aatggatttcctggcaggacg

SEQ ID NO: 52666 - DNA, 20 bp, Artificial Sequence
  Synthetic: FXN 5 forward 9:69037130-69037153; SpCas9
atggatttcctggcaggacg

SEQ ID NO: 52667 - DNA, 19 bp, Artificial Sequence
  Synthetic: FXN 5 forward 9:69037131-69037153; SpCas9
tggatttcctggcaggacg

SEQ ID NO: 52668 - DNA, 18 bp, Artificial Sequence
  Synthetic: FXN 5 forward 9:69037132-69037153; SpCas9
ggatttcctggcaggacg

SEQ ID NO: 52669 - DNA, 25 bp, Artificial Sequence
  Synthetic: FXN 5 forward 9:69037128-69037156; SpCas9
aaatggatttcctggcaggacgcgg

SEQ ID NO: 52670 - DNA, 24 bp, Artificial Sequence
  Synthetic: FXN 5 forward 9:69037129-69037156; SpCas9
aatggatttcctggcaggacgcgg

SEQ ID NO: 52671 - DNA, 23 bp, Artificial Sequence
  Synthetic: FXN 5 forward 9:69037130-69037156; SpCas9
atggatttcctggcaggacgcgg

SEQ ID NO: 52672 - DNA, 22 bp, Artificial Sequence
  Synthetic: FXN 5 forward 9:69037131-69037156; SpCas9
tggatttcctggcaggacgcgg

SEQ ID NO: 52673 - DNA, 21 bp, Artificial Sequence
  Synthetic: FXN 5 forward 9:69037132-69037156; SpCas9
ggatttcctggcaggacgcgg

SEQ ID NO: 52674 - DNA, 20 bp, Artificial Sequence
  Synthetic: FXN 5 forward 9:69037133-69037156; SpCas9
gatttcctggcaggacgcgg

SEQ ID NO: 52675 - DNA, 19 bp, Artificial Sequence
  Synthetic: FXN 5 forward 9:69037134-69037156; SpCas9
atttcctggcaggacgcgg

SEQ ID NO: 52676 - DNA, 18 bp, Artificial Sequence
  Synthetic: FXN 5 forward 9:69037135-69037156; SpCas9
tttcctggcaggacgcgg

SEQ ID NO: 52677 - DNA, 25 bp, Artificial Sequence
  Synthetic: FXN 5 reverse 9:69037138-69037166; SpCas9
tgggcatgagccaccgcgtcctgcc

SEQ ID NO: 52678 - DNA, 24 bp, Artificial Sequence
  Synthetic: FXN 5 reverse 9:69037139-69037166; SpCas9
gggcatgagccaccgcgtcctgcc

SEQ ID NO: 52679 - DNA, 23 bp, Artificial Sequence
  Synthetic: FXN 5 reverse 9:69037140-69037166; SpCas9
ggcatgagccaccgcgtcctgcc

SEQ ID NO: 52680 - DNA, 22 bp, Artificial Sequence
  Synthetic: FXN 5 reverse 9:69037141-69037166; SpCas9
gcatgagccaccgcgtcctgcc

SEQ ID NO: 52681 - DNA, 21 bp, Artificial Sequence
  Synthetic: FXN 5 reverse 9:69037142-69037166; SpCas9
catgagccaccgcgtcctgcc

SEQ ID NO: 52682 - DNA, 20 bp, Artificial Sequence
  Synthetic: FXN 5 reverse 9:69037143-69037166; SpCas9
atgagccaccgcgtcctgcc

SEQ ID NO: 52683 - DNA, 19 bp, Artificial Sequence
  Synthetic: FXN 5 reverse 9:69037144-69037166; SpCas9
tgagccaccgcgtcctgcc

SEQ ID NO: 52684 - DNA, 18 bp, Artificial Sequence
  Synthetic: FXN 5 reverse 9:69037145-69037166; SpCas9
gagccaccgcgtcctgcc

SEQ ID NO: 52685 - DNA, 25 bp, Artificial Sequence
  Synthetic: FXN 5 reverse 9:69037139-69037167; SpCas9
atgggcatgagccaccgcgtcctgc

SEQ ID NO: 52686 - DNA, 24 bp, Artificial Sequence
  Synthetic: FXN 5 reverse 9:69037140-69037167; SpCas9
tgggcatgagccaccgcgtcctgc

SEQ ID NO: 52687 - DNA, 23 bp, Artificial Sequence
  Synthetic: FXN 5 reverse 9:69037141-69037167; SpCas9
gggcatgagccaccgcgtcctgc

SEQ ID NO: 52688 - DNA, 22 bp, Artificial Sequence
  Synthetic: FXN 5 reverse 9:69037142-69037167; SpCas9
ggcatgagccaccgcgtcctgc

SEQ ID NO: 52689 - DNA, 21 bp, Artificial Sequence
  Synthetic: FXN 5 reverse 9:69037143-69037167; SpCas9
gcatgagccaccgcgtcctgc

SEQ ID NO: 52690 - DNA, 20 bp, Artificial Sequence
  Synthetic: FXN 5 reverse 9:69037144-69037167; SpCas9
catgagccaccgcgtcctgc

SEQ ID NO: 52691 - DNA, 19 bp, Artificial Sequence
  Synthetic: FXN 5 reverse 9:69037145-69037167; SpCas9
atgagccaccgcgtcctgc

SEQ ID NO: 52692 - DNA, 18 bp, Artificial Sequence
  Synthetic: FXN 5 reverse 9:69037146-69037167; SpCas9
tgagccaccgcgtcctgc

SEQ ID NO: 52693 - DNA, 25 bp, Artificial Sequence
  Synthetic: FXN 5 forward 9:69037147-69037175; SpCas9
acgcggtggctcatgcccataatct

SEQ ID NO: 52694 - DNA, 24 bp, Artificial Sequence
  Synthetic: FXN 5 forward 9:69037148-69037175; SpCas9
cgcggtggctcatgcccataatct

SEQ ID NO: 52695 - DNA, 23 bp, Artificial Sequence
  Synthetic: FXN 5 forward 9:69037149-69037175; SpCas9
gcggtggctcatgcccataatct

SEQ ID NO: 52696 - DNA, 22 bp, Artificial Sequence
  Synthetic: FXN 5 forward 9:69037150-69037175; SpCas9
cggtggctcatgcccataatct

SEQ ID NO: 52697 - DNA, 21 bp, Artificial Sequence
  Synthetic: FXN 5 forward 9:69037151-69037175; SpCas9
ggtggctcatgcccataatct

SEQ ID NO: 52698 - DNA, 20 bp, Artificial Sequence
  Synthetic: FXN 5 forward 9:69037152-69037175; SpCas9
gtggctcatgcccataatct

SEQ ID NO: 52699 - DNA, 19 bp, Artificial Sequence
  Synthetic: FXN 5 forward 9:69037153-69037175; SpCas9
tggctcatgcccataatct

SEQ ID NO: 52700 - DNA, 18 bp, Artificial Sequence
  Synthetic: FXN 5 forward 9:69037154-69037175; SpCas9
ggctcatgcccataatct

SEQ ID NO: 52701 - DNA, 25 bp, Artificial Sequence
  Synthetic: FXN 5 forward 9:69037155-69037183; SpCas9
gctcatgcccataatctcagcactt

SEQ ID NO: 52702 - DNA, 24 bp, Artificial Sequence
  Synthetic: FXN 5 forward 9:69037156-69037183; SpCas9
ctcatgcccataatctcagcactt

SEQ ID NO: 52703 - DNA, 23 bp, Artificial Sequence
  Synthetic: FXN 5 forward 9:69037157-69037183; SpCas9
tcatgcccataatctcagcactt

SEQ ID NO: 52704 - DNA, 22 bp, Artificial Sequence
  Synthetic: FXN 5 forward 9:69037158-69037183; SpCas9
catgcccataatctcagcactt

SEQ ID NO: 52705 - DNA, 21 bp, Artificial Sequence
  Synthetic: FXN 5 forward 9:69037159-69037183; SpCas9
atgcccataatctcagcactt

SEQ ID NO: 52706 - DNA, 20 bp, Artificial Sequence
  Synthetic: FXN 5 forward 9:69037160-69037183; SpCas9
tgcccataatctcagcactt

SEQ ID NO: 52707 - DNA, 19 bp, Artificial Sequence
  Synthetic: FXN 5 forward 9:69037161-69037183; SpCas9
gcccataatctcagcactt

SEQ ID NO: 52708 - DNA, 18 bp, Artificial Sequence
  Synthetic: FXN 5 forward 9:69037162-69037183; SpCas9
cccataatctcagcactt

SEQ ID NO: 52709 - DNA, 25 bp, Artificial Sequence
  Synthetic: FXN 5 forward 9:69037156-69037184; SpCas9
ctcatgcccataatctcagcacttt

SEQ ID NO: 52710 - DNA, 24 bp, Artificial Sequence
  Synthetic: FXN 5 forward 9:69037157-69037184; SpCas9
tcatgcccataatctcagcacttt

SEQ ID NO: 52711 - DNA, 23 bp, Artificial Sequence
  Synthetic: FXN 5 forward 9:69037158-69037184; SpCas9
catgcccataatctcagcacttt

SEQ ID NO: 52712 - DNA, 22 bp, Artificial Sequence
  Synthetic: FXN 5 forward 9:69037159-69037184; SpCas9
atgcccataatctcagcacttt

SEQ ID NO: 52713 - DNA, 21 bp, Artificial Sequence
  Synthetic: FXN 5 forward 9:69037160-69037184; SpCas9
tgcccataatctcagcacttt

SEQ ID NO: 52714 - DNA, 20 bp, Artificial Sequence
  Synthetic: FXN 5 forward 9:69037161-69037184; SpCas9
gcccataatctcagcacttt

SEQ ID NO: 52715 - DNA, 19 bp, Artificial Sequence
  Synthetic: FXN 5 forward 9:69037162-69037184; SpCas9
cccataatctcagcacttt

SEQ ID NO: 52716 - DNA, 18 bp, Artificial Sequence
  Synthetic: FXN 5 forward 9:69037163-69037184; SpCas9
ccataatctcagcacttt

SEQ ID NO: 52717 - DNA, 25 bp, Artificial Sequence
  Synthetic: FXN 5 reverse 9:69037156-69037184; SpCas9
cccaaagtgctgagattatgggcat

SEQ ID NO: 52718 - DNA, 24 bp, Artificial Sequence
  Synthetic: FXN 5 reverse 9:69037157-69037184; SpCas9
ccaaagtgctgagattatgggcat

SEQ ID NO: 52719 - DNA, 23 bp, Artificial Sequence
  Synthetic: FXN 5 reverse 9:69037158-69037184; SpCas9
caaagtgctgagattatgggcat

SEQ ID NO: 52720 - DNA, 22 bp, Artificial Sequence
  Synthetic: FXN 5 reverse 9:69037159-69037184; SpCas9
aaagtgctgagattatgggcat

SEQ ID NO: 52721 - DNA, 21 bp, Artificial Sequence
  Synthetic: FXN 5 reverse 9:69037160-69037184; SpCas9
aagtgctgagattatgggcat

SEQ ID NO: 52722 - DNA, 20 bp, Artificial Sequence
  Synthetic: FXN 5 reverse 9:69037161-69037184; SpCas9
agtgctgagattatgggcat

SEQ ID NO: 52723 - DNA, 19 bp, Artificial Sequence
  Synthetic: FXN 5 reverse 9:69037162-69037184; SpCas9
gtgctgagattatgggcat

SEQ ID NO: 52724 - DNA, 18 bp, Artificial Sequence
  Synthetic: FXN 5 reverse 9:69037163-69037184; SpCas9
tgctgagattatgggcat

SEQ ID NO: 52725 - DNA, 25 bp, Artificial Sequence
  Synthetic: FXN 5 forward 9:69037158-69037186; SpCas9
catgcccataatctcagcactttgg

SEQ ID NO: 52726 - DNA, 24 bp, Artificial Sequence
  Synthetic: FXN 5 forward 9:69037159-69037186; SpCas9
atgcccataatctcagcactttgg

SEQ ID NO: 52727 - DNA, 23 bp, Artificial Sequence
  Synthetic: FXN 5 forward 9:69037160-69037186; SpCas9
tgcccataatctcagcactttgg

SEQ ID NO: 52728 - DNA, 22 bp, Artificial Sequence
  Synthetic: FXN 5 forward 9:69037161-69037186; SpCas9
gcccataatctcagcactttgg

SEQ ID NO: 52729 - DNA, 21 bp, Artificial Sequence
  Synthetic: FXN 5 forward 9:69037162-69037186; SpCas9
cccataatctcagcactttgg

SEQ ID NO: 52730 - DNA, 20 bp, Artificial Sequence
  Synthetic: FXN 5 forward 9:69037163-69037186; SpCas9
ccataatctcagcactttgg

SEQ ID NO: 52731 - DNA, 19 bp, Artificial Sequence
  Synthetic: FXN 5 forward 9:69037164-69037186; SpCas9
cataatctcagcactttgg

SEQ ID NO: 52732 - DNA, 18 bp, Artificial Sequence
  Synthetic: FXN 5 forward 9:69037165-69037186; SpCas9
ataatctcagcactttgg

SEQ ID NO: 52733 - DNA, 25 bp, Artificial Sequence
  Synthetic: FXN 5 forward 9:69037159-69037187; SpCas9
atgcccataatctcagcactttggg

SEQ ID NO: 52734 - DNA, 24 bp, Artificial Sequence
  Synthetic: FXN 5 forward 9:69037160-69037187; SpCas9
tgcccataatctcagcactttggg

SEQ ID NO: 52735 - DNA, 23 bp, Artificial Sequence
  Synthetic: FXN 5 forward 9:69037161-69037187; SpCas9
gcccataatctcagcactttggg

SEQ ID NO: 52736 - DNA, 22 bp, Artificial Sequence
  Synthetic: FXN 5 forward 9:69037162-69037187; SpCas9
cccataatctcagcactttggg

SEQ ID NO: 52737 - DNA, 21 bp, Artificial Sequence
  Synthetic: FXN 5 forward 9:69037163-69037187; SpCas9
ccataatctcagcactttggg

SEQ ID NO: 52738 - DNA, 20 bp, Artificial Sequence
  Synthetic: FXN 5 forward 9:69037164-69037187; SpCas9
cataatctcagcactttggg

SEQ ID NO: 52739 - DNA, 19 bp, Artificial Sequence
  Synthetic: FXN 5 forward 9:69037165-69037187; SpCas9
ataatctcagcactttggg

SEQ ID NO: 52740 - DNA, 18 bp, Artificial Sequence
  Synthetic: FXN 5 forward 9:69037166-69037187; SpCas9
taatctcagcactttggg

SEQ ID NO: 52741 - DNA, 25 bp, Artificial Sequence
  Synthetic: FXN 5 reverse 9:69037162-69037190; SpCas9
aggcctcccaaagtgctgagattat

SEQ ID NO: 52742 - DNA, 24 bp, Artificial Sequence
  Synthetic: FXN 5 reverse 9:69037163-69037190; SpCas9
ggcctcccaaagtgctgagattat

SEQ ID NO: 52743 - DNA, 23 bp, Artificial Sequence
  Synthetic: FXN 5 reverse 9:69037164-69037190; SpCas9
gcctcccaaagtgctgagattat

SEQ ID NO: 52744 - DNA, 22 bp, Artificial Sequence
  Synthetic: FXN 5 reverse 9:69037165-69037190; SpCas9
cctcccaaagtgctgagattat

SEQ ID NO: 52745 - DNA, 21 bp, Artificial Sequence
  Synthetic: FXN 5 reverse 9:69037166-69037190; SpCas9
ctcccaaagtgctgagattat

SEQ ID NO: 52746 - DNA, 20 bp, Artificial Sequence
  Synthetic: FXN 5 reverse 9:69037167-69037190; SpCas9
tcccaaagtgctgagattat

SEQ ID NO: 52747 - DNA, 19 bp, Artificial Sequence
  Synthetic: FXN 5 reverse 9:69037168-69037190; SpCas9
cccaaagtgctgagattat

SEQ ID NO: 52748 - DNA, 18 bp, Artificial Sequence
  Synthetic: FXN 5 reverse 9:69037169-69037190; SpCas9
ccaaagtgctgagattat

SEQ ID NO: 52749 - DNA, 25 bp, Artificial Sequence
  Synthetic: FXN 5 reverse 9:69037163-69037191; SpCas9
taggcctcccaaagtgctgagatta

SEQ ID NO: 52750 - DNA, 24 bp, Artificial Sequence
  Synthetic: FXN 5 reverse 9:69037164-69037191; SpCas9
aggcctcccaaagtgctgagatta

SEQ ID NO: 52751 - DNA, 23 bp, Artificial Sequence
  Synthetic: FXN 5 reverse 9:69037165-69037191; SpCas9
ggcctcccaaagtgctgagatta

SEQ ID NO: 52752 - DNA, 22 bp, Artificial Sequence
  Synthetic: FXN 5 reverse 9:69037166-69037191; SpCas9
gcctcccaaagtgctgagatta

SEQ ID NO: 52753 - DNA, 21 bp, Artificial Sequence
  Synthetic: FXN 5 reverse 9:69037167-69037191; SpCas9
cctcccaaagtgctgagatta

SEQ ID NO: 52754 - DNA, 20 bp, Artificial Sequence
  Synthetic: FXN 5 reverse 9:69037168-69037191; SpCas9
ctcccaaagtgctgagatta

SEQ ID NO: 52755 - DNA, 19 bp, Artificial Sequence
  Synthetic: FXN 5 reverse 9:69037169-69037191; SpCas9
tcccaaagtgctgagatta

SEQ ID NO: 52756 - DNA, 18 bp, Artificial Sequence
  Synthetic: FXN 5 reverse 9:69037170-69037191; SpCas9
cccaaagtgctgagatta

SEQ ID NO: 52757 - DNA, 25 bp, Artificial Sequence
  Synthetic: FXN 5 forward 9:69037164-69037192; SpCas9
cataatctcagcactttgggaggcc

SEQ ID NO: 52758 - DNA, 24 bp, Artificial Sequence
  Synthetic: FXN 5 forward 9:69037165-69037192; SpCas9
ataatctcagcactttgggaggcc

SEQ ID NO: 52759 - DNA, 23 bp, Artificial Sequence
  Synthetic: FXN 5 forward 9:69037166-69037192; SpCas9
taatctcagcactttgggaggcc

SEQ ID NO: 52760 - DNA, 22 bp, Artificial Sequence
  Synthetic: FXN 5 forward 9:69037167-69037192; SpCas9
aatctcagcactttgggaggcc

SEQ ID NO: 52761 - DNA, 21 bp, Artificial Sequence
  Synthetic: FXN 5 forward 9:69037168-69037192; SpCas9
atctcagcactttgggaggcc

SEQ ID NO: 52762 - DNA, 20 bp, Artificial Sequence
  Synthetic: FXN 5 forward 9:69037169-69037192; SpCas9
tctcagcactttgggaggcc

SEQ ID NO: 52763 - DNA, 19 bp, Artificial Sequence
  Synthetic: FXN 5 forward 9:69037170-69037192; SpCas9
ctcagcactttgggaggcc

SEQ ID NO: 52764 - DNA, 18 bp, Artificial Sequence
  Synthetic: FXN 5 forward 9:69037171-69037192; SpCas9
tcagcactttgggaggcc

SEQ ID NO: 52765 - DNA, 25 bp, Artificial Sequence
  Synthetic: FXN 5 forward 9:69037165-69037193; SpCas9
ataatctcagcactttgggaggcct

SEQ ID NO: 52766 - DNA, 24 bp, Artificial Sequence
  Synthetic: FXN 5 forward 9:69037166-69037193; SpCas9
taatctcagcactttgggaggcct

SEQ ID NO: 52767 - DNA, 23 bp, Artificial Sequence
  Synthetic: FXN 5 forward 9:69037167-69037193; SpCas9
aatctcagcactttgggaggcct

SEQ ID NO: 52768 - DNA, 22 bp, Artificial Sequence
  Synthetic: FXN 5 forward 9:69037168-69037193; SpCas9
atctcagcactttgggaggcct

SEQ ID NO: 52769 - DNA, 21 bp, Artificial Sequence
  Synthetic: FXN 5 forward 9:69037169-69037193; SpCas9
tctcagcactttgggaggcct

SEQ ID NO: 52770 - DNA, 20 bp, Artificial Sequence
  Synthetic: FXN 5 forward 9:69037170-69037193; SpCas9
ctcagcactttgggaggcct

SEQ ID NO: 52771 - DNA, 19 bp, Artificial Sequence
  Synthetic: FXN 5 forward 9:69037171-69037193; SpCas9
tcagcactttgggaggcct

SEQ ID NO: 52772 - DNA, 18 bp, Artificial Sequence
  Synthetic: FXN 5 forward 9:69037172-69037193; SpCas9
cagcactttgggaggcct

SEQ ID NO: 52773 - DNA, 25 bp, Artificial Sequence
  Synthetic: FXN 5 forward 9:69037168-69037196; SpCas9
atctcagcactttgggaggcctagg

SEQ ID NO: 52774 - DNA, 24 bp, Artificial Sequence
  Synthetic: FXN 5 forward 9:69037169-69037196; SpCas9
tctcagcactttgggaggcctagg

SEQ ID NO: 52775 - DNA, 23 bp, Artificial Sequence
  Synthetic: FXN 5 forward 9:69037170-69037196; SpCas9
ctcagcactttgggaggcctagg

SEQ ID NO: 52776 - DNA, 22 bp, Artificial Sequence
  Synthetic: FXN 5 forward 9:69037171-69037196; SpCas9
tcagcactttgggaggcctagg

SEQ ID NO: 52777 - DNA, 21 bp, Artificial Sequence
  Synthetic: FXN 5 forward 9:69037172-69037196; SpCas9
cagcactttgggaggcctagg

SEQ ID NO: 52778 - DNA, 20 bp, Artificial Sequence
  Synthetic: FXN 5 forward 9:69037173-69037196; SpCas9
agcactttgggaggcctagg

SEQ ID NO: 52779 - DNA, 19 bp, Artificial Sequence
  Synthetic: FXN 5 forward 9:69037174-69037196; SpCas9
gcactttgggaggcctagg

SEQ ID NO: 52780 - DNA, 18 bp, Artificial Sequence
  Synthetic: FXN 5 forward 9:69037175-69037196; SpCas9
cactttgggaggcctagg

SEQ ID NO: 52781 - DNA, 25 bp, Artificial Sequence
  Synthetic: FXN 5 forward 9:69037169-69037197; SpCas9
tctcagcactttgggaggcctagga

SEQ ID NO: 52782 - DNA, 24 bp, Artificial Sequence
  Synthetic: FXN 5 forward 9:69037170-69037197; SpCas9
ctcagcactttgggaggcctagga

SEQ ID NO: 52783 - DNA, 23 bp, Artificial Sequence
  Synthetic: FXN 5 forward 9:69037171-69037197; SpCas9
tcagcactttgggaggcctagga

SEQ ID NO: 52784 - DNA, 22 bp, Artificial Sequence
  Synthetic: FXN 5 forward 9:69037172-69037197; SpCas9
cagcactttgggaggcctagga

SEQ ID NO: 52785 - DNA, 21 bp, Artificial Sequence
  Synthetic: FXN 5 forward 9:69037173-69037197; SpCas9
agcactttgggaggcctagga

SEQ ID NO: 52786 - DNA, 20 bp, Artificial Sequence
  Synthetic: FXN 5 forward 9:69037174-69037197; SpCas9
gcactttgggaggcctagga

SEQ ID NO: 52787 - DNA, 19 bp, Artificial Sequence
  Synthetic: FXN 5 forward 9:69037175-69037197; SpCas9
cactttgggaggcctagga

SEQ ID NO: 52788 - DNA, 18 bp, Artificial Sequence
  Synthetic: FXN 5 forward 9:69037176-69037197; SpCas9
actttgggaggcctagga

SEQ ID NO: 52789 - DNA, 25 bp, Artificial Sequence
  Synthetic: FXN 5 reverse 9:69037170-69037198; SpCas9
accttcctaggcctcccaaagtgct

SEQ ID NO: 52790 - DNA, 24 bp, Artificial Sequence
  Synthetic: FXN 5 reverse 9:69037171-69037198; SpCas9
ccttcctaggcctcccaaagtgct

SEQ ID NO: 52791 - DNA, 23 bp, Artificial Sequence
  Synthetic: FXN 5 reverse 9:69037172-69037198; SpCas9
cttcctaggcctcccaaagtgct

SEQ ID NO: 52792 - DNA, 22 bp, Artificial Sequence
  Synthetic: FXN 5 reverse 9:69037173-69037198; SpCas9
ttcctaggcctcccaaagtgct

SEQ ID NO: 52793 - DNA, 21 bp, Artificial Sequence
  Synthetic: FXN 5 reverse 9:69037174-69037198; SpCas9
tcctaggcctcccaaagtgct

SEQ ID NO: 52794 - DNA, 20 bp, Artificial Sequence
  Synthetic: FXN 5 reverse 9:69037175-69037198; SpCas9
cctaggcctcccaaagtgct

SEQ ID NO: 52795 - DNA, 19 bp, Artificial Sequence
  Synthetic: FXN 5 reverse 9:69037176-69037198; SpCas9
ctaggcctcccaaagtgct

SEQ ID NO: 52796 - DNA, 18 bp, Artificial Sequence
  Synthetic: FXN 5 reverse 9:69037177-69037198; SpCas9
taggcctcccaaagtgct

SEQ ID NO: 52797 - DNA, 25 bp, Artificial Sequence
  Synthetic: FXN 5 forward 9:69037172-69037200; SpCas9
cagcactttgggaggcctaggaagg

SEQ ID NO: 52798 - DNA, 24 bp, Artificial Sequence
  Synthetic: FXN 5 forward 9:69037173-69037200; SpCas9
agcactttgggaggcctaggaagg

SEQ ID NO: 52799 - DNA, 23 bp, Artificial Sequence
  Synthetic: FXN 5 forward 9:69037174-69037200; SpCas9
gcactttgggaggcctaggaagg

SEQ ID NO: 52800 - DNA, 22 bp, Artificial Sequence
  Synthetic: FXN 5 forward 9:69037175-69037200; SpCas9
cactttgggaggcctaggaagg

SEQ ID NO: 52801 - DNA, 21 bp, Artificial Sequence
  Synthetic: FXN 5 forward 9:69037176-69037200; SpCas9
actttgggaggcctaggaagg

SEQ ID NO: 52802 - DNA, 20 bp, Artificial Sequence
  Synthetic: FXN 5 forward 9:69037177-69037200; SpCas9
ctttgggaggcctaggaagg

SEQ ID NO: 52803 - DNA, 19 bp, Artificial Sequence
  Synthetic: FXN 5 forward 9:69037178-69037200; SpCas9
tttgggaggcctaggaagg

SEQ ID NO: 52804 - DNA, 18 bp, Artificial Sequence
  Synthetic: FXN 5 forward 9:69037179-69037200; SpCas9
ttgggaggcctaggaagg

SEQ ID NO: 52805 - DNA, 25 bp, Artificial Sequence
  Synthetic: FXN 5 reverse 9:69037177-69037205; SpCas9
gtgatccaccttcctaggcctccca

SEQ ID NO: 52806 - DNA, 24 bp, Artificial Sequence
  Synthetic: FXN 5 reverse 9:69037178-69037205; SpCas9
tgatccaccttcctaggcctccca

SEQ ID NO: 52807 - DNA, 23 bp, Artificial Sequence
  Synthetic: FXN 5 reverse 9:69037179-69037205; SpCas9
gatccaccttcctaggcctccca

SEQ ID NO: 52808 - DNA, 22 bp, Artificial Sequence
  Synthetic: FXN 5 reverse 9:69037180-69037205; SpCas9
atccaccttcctaggcctccca

SEQ ID NO: 52809 - DNA, 21 bp, Artificial Sequence
  Synthetic: FXN 5 reverse 9:69037181-69037205; SpCas9
tccaccttcctaggcctccca

SEQ ID NO: 52810 - DNA, 20 bp, Artificial Sequence
  Synthetic: FXN 5 reverse 9:69037182-69037205; SpCas9
ccaccttcctaggcctccca

SEQ ID NO: 52811 - DNA, 19 bp, Artificial Sequence
  Synthetic: FXN 5 reverse 9:69037183-69037205; SpCas9
caccttcctaggcctccca

SEQ ID NO: 52812 - DNA, 18 bp, Artificial Sequence
  Synthetic: FXN 5 reverse 9:69037184-69037205; SpCas9
accttcctaggcctccca

SEQ ID NO: 52813 - DNA, 25 bp, Artificial Sequence
  Synthetic: FXN 5 forward 9:69037182-69037210; SpCas9
ggaggcctaggaaggtggatcacct

SEQ ID NO: 52814 - DNA, 24 bp, Artificial Sequence
  Synthetic: FXN 5 forward 9:69037183-69037210; SpCas9
gaggcctaggaaggtggatcacct

SEQ ID NO: 52815 - DNA, 23 bp, Artificial Sequence
  Synthetic: FXN 5 forward 9:69037184-69037210; SpCas9
aggcctaggaaggtggatcacct

SEQ ID NO: 52816 - DNA, 22 bp, Artificial Sequence
  Synthetic: FXN 5 forward 9:69037185-69037210; SpCas9
ggcctaggaaggtggatcacct

SEQ ID NO: 52817 - DNA, 21 bp, Artificial Sequence
  Synthetic: FXN 5 forward 9:69037186-69037210; SpCas9
gcctaggaaggtggatcacct

SEQ ID NO: 52818 - DNA, 20 bp, Artificial Sequence
  Synthetic: FXN 5 forward 9:69037187-69037210; SpCas9
cctaggaaggtggatcacct

SEQ ID NO: 52819 - DNA, 19 bp, Artificial Sequence
  Synthetic: FXN 5 forward 9:69037188-69037210; SpCas9
ctaggaaggtggatcacct

SEQ ID NO: 52820 - DNA, 18 bp, Artificial Sequence
  Synthetic: FXN 5 forward 9:69037189-69037210; SpCas9
taggaaggtggatcacct

SEQ ID NO: 52821 - DNA, 25 bp, Artificial Sequence
  Synthetic: FXN 5 forward 9:69037183-69037211; SpCas9
gaggcctaggaaggtggatcacctg

SEQ ID NO: 52822 - DNA, 24 bp, Artificial Sequence
  Synthetic: FXN 5 forward 9:69037184-69037211; SpCas9
aggcctaggaaggtggatcacctg

SEQ ID NO: 52823 - DNA, 23 bp, Artificial Sequence
  Synthetic: FXN 5 forward 9:69037185-69037211; SpCas9
ggcctaggaaggtggatcacctg

SEQ ID NO: 52824 - DNA, 22 bp, Artificial Sequence
  Synthetic: FXN 5 forward 9:69037186-69037211; SpCas9
gcctaggaaggtggatcacctg

SEQ ID NO: 52825 - DNA, 21 bp, Artificial Sequence
  Synthetic: FXN 5 forward 9:69037187-69037211; SpCas9
cctaggaaggtggatcacctg

SEQ ID NO: 52826 - DNA, 20 bp, Artificial Sequence
  Synthetic: FXN 5 forward 9:69037188-69037211; SpCas9
ctaggaaggtggatcacctg

SEQ ID NO: 52827 - DNA, 19 bp, Artificial Sequence
  Synthetic: FXN 5 forward 9:69037189-69037211; SpCas9
taggaaggtggatcacctg

SEQ ID NO: 52828 - DNA, 18 bp, Artificial Sequence
  Synthetic: FXN 5 forward 9:69037190-69037211; SpCas9
aggaaggtggatcacctg

SEQ ID NO: 52829 - DNA, 25 bp, Artificial Sequence
  Synthetic: FXN 5 reverse 9:69037187-69037215; SpCas9
cggacctcaggtgatccaccttcct

SEQ ID NO: 52830 - DNA, 24 bp, Artificial Sequence
  Synthetic: FXN 5 reverse 9:69037188-69037215; SpCas9
ggacctcaggtgatccaccttcct

SEQ ID NO: 52831 - DNA, 23 bp, Artificial Sequence
  Synthetic: FXN 5 reverse 9:69037189-69037215; SpCas9
gacctcaggtgatccaccttcct

SEQ ID NO: 52832 - DNA, 22 bp, Artificial Sequence
  Synthetic: FXN 5 reverse 9:69037190-69037215; SpCas9
acctcaggtgatccaccttcct

SEQ ID NO: 52833 - DNA, 21 bp, Artificial Sequence
  Synthetic: FXN 5 reverse 9:69037191-69037215; SpCas9
cctcaggtgatccaccttcct

SEQ ID NO: 52834 - DNA, 20 bp, Artificial Sequence
  Synthetic: FXN 5 reverse 9:69037192-69037215; SpCas9
ctcaggtgatccaccttcct

SEQ ID NO: 52835 - DNA, 19 bp, Artificial Sequence
  Synthetic: FXN 5 reverse 9:69037193-69037215; SpCas9
tcaggtgatccaccttcct

SEQ ID NO: 52836 - DNA, 18 bp, Artificial Sequence
  Synthetic: FXN 5 reverse 9:69037194-69037215; SpCas9
caggtgatccaccttcct

SEQ ID NO: 52837 - DNA, 25 bp, Artificial Sequence
  Synthetic: FXN 5 forward 9:69037188-69037216; SpCas9
ctaggaaggtggatcacctgaggtc

SEQ ID NO: 52838 - DNA, 24 bp, Artificial Sequence
  Synthetic: FXN 5 forward 9:69037189-69037216; SpCas9
taggaaggtggatcacctgaggtc

SEQ ID NO: 52839 - DNA, 23 bp, Artificial Sequence
  Synthetic: FXN 5 forward 9:69037190-69037216; SpCas9
aggaaggtggatcacctgaggtc

SEQ ID NO: 52840 - DNA, 22 bp, Artificial Sequence
  Synthetic: FXN 5 forward 9:69037191-69037216; SpCas9
ggaaggtggatcacctgaggtc

SEQ ID NO: 52841 - DNA, 21 bp, Artificial Sequence
  Synthetic: FXN 5 forward 9:69037192-69037216; SpCas9
gaaggtggatcacctgaggtc

SEQ ID NO: 52842 - DNA, 20 bp, Artificial Sequence
  Synthetic: FXN 5 forward 9:69037193-69037216; SpCas9
aaggtggatcacctgaggtc

SEQ ID NO: 52843 - DNA, 19 bp, Artificial Sequence
  Synthetic: FXN 5 forward 9:69037194-69037216; SpCas9
aggtggatcacctgaggtc

SEQ ID NO: 52844 - DNA, 18 bp, Artificial Sequence
  Synthetic: FXN 5 forward 9:69037195-69037216; SpCas9
ggtggatcacctgaggtc

SEQ ID NO: 52845 - DNA, 25 bp, Artificial Sequence
  Synthetic: FXN 5 reverse 9:69037188-69037216; SpCas9
ccggacctcaggtgatccaccttcc

SEQ ID NO: 52846 - DNA, 24 bp, Artificial Sequence
  Synthetic: FXN 5 reverse 9:69037189-69037216; SpCas9
cggacctcaggtgatccaccttcc

SEQ ID NO: 52847 - DNA, 23 bp, Artificial Sequence
  Synthetic: FXN 5 reverse 9:69037190-69037216; SpCas9
ggacctcaggtgatccaccttcc

SEQ ID NO: 52848 - DNA, 22 bp, Artificial Sequence
  Synthetic: FXN 5 reverse 9:69037191-69037216; SpCas9
gacctcaggtgatccaccttcc

SEQ ID NO: 52849 - DNA, 21 bp, Artificial Sequence
  Synthetic: FXN 5 reverse 9:69037192-69037216; SpCas9
acctcaggtgatccaccttcc

SEQ ID NO: 52850 - DNA, 20 bp, Artificial Sequence
  Synthetic: FXN 5 reverse 9:69037193-69037216; SpCas9
cctcaggtgatccaccttcc

SEQ ID NO: 52851 - DNA, 19 bp, Artificial Sequence
  Synthetic: FXN 5 reverse 9:69037194-69037216; SpCas9
ctcaggtgatccaccttcc

SEQ ID NO: 52852 - DNA, 18 bp, Artificial Sequence
  Synthetic: FXN 5 reverse 9:69037195-69037216; SpCas9
tcaggtgatccaccttcc

SEQ ID NO: 52853 - DNA, 25 bp, Artificial Sequence
  Synthetic: FXN 5 forward 9:69037190-69037218; SpCas9
aggaaggtggatcacctgaggtccg

SEQ ID NO: 52854 - DNA, 24 bp, Artificial Sequence
  Synthetic: FXN 5 forward 9:69037191-69037218; SpCas9
ggaaggtggatcacctgaggtccg

SEQ ID NO: 52855 - DNA, 23 bp, Artificial Sequence
  Synthetic: FXN 5 forward 9:69037192-69037218; SpCas9
gaaggtggatcacctgaggtccg

SEQ ID NO: 52856 - DNA, 22 bp, Artificial Sequence
  Synthetic: FXN 5 forward 9:69037193-69037218; SpCas9
aaggtggatcacctgaggtccg

SEQ ID NO: 52857 - DNA, 21 bp, Artificial Sequence
  Synthetic: FXN 5 forward 9:69037194-69037218; SpCas9
aggtggatcacctgaggtccg

SEQ ID NO: 52858 - DNA, 20 bp, Artificial Sequence
  Synthetic: FXN 5 forward 9:69037195-69037218; SpCas9
ggtggatcacctgaggtccg

SEQ ID NO: 52859 - DNA, 19 bp, Artificial Sequence
  Synthetic: FXN 5 forward 9:69037196-69037218; SpCas9
gtggatcacctgaggtccg

SEQ ID NO: 52860 - DNA, 18 bp, Artificial Sequence
  Synthetic: FXN 5 forward 9:69037197-69037218; SpCas9
tggatcacctgaggtccg

SEQ ID NO: 52861 - DNA, 25 bp, Artificial Sequence
  Synthetic: FXN 5 forward 9:69037196-69037224; SpCas9
gtggatcacctgaggtccggagttc

SEQ ID NO: 52862 - DNA, 24 bp, Artificial Sequence
  Synthetic: FXN 5 forward 9:69037197-69037224; SpCas9
tggatcacctgaggtccggagttc

SEQ ID NO: 52863 - DNA, 23 bp, Artificial Sequence
  Synthetic: FXN 5 forward 9:69037198-69037224; SpCas9
ggatcacctgaggtccggagttc

SEQ ID NO: 52864 - DNA, 22 bp, Artificial Sequence
  Synthetic: FXN 5 forward 9:69037199-69037224; SpCas9
gatcacctgaggtccggagttc

SEQ ID NO: 52865 - DNA, 21 bp, Artificial Sequence
  Synthetic: FXN 5 forward 9:69037200-69037224; SpCas9
atcacctgaggtccggagttc

SEQ ID NO: 52866 - DNA, 20 bp, Artificial Sequence
  Synthetic: FXN 5 forward 9:69037201-69037224; SpCas9
tcacctgaggtccggagttc

SEQ ID NO: 52867 - DNA, 19 bp, Artificial Sequence
  Synthetic: FXN 5 forward 9:69037202-69037224; SpCas9
cacctgaggtccggagttc

SEQ ID NO: 52868 - DNA, 18 bp, Artificial Sequence
  Synthetic: FXN 5 forward 9:69037203-69037224; SpCas9
acctgaggtccggagttc

SEQ ID NO: 52869 - DNA, 25 bp, Artificial Sequence
  Synthetic: FXN 5 reverse 9:69037204-69037232; SpCas9
aggttagtcttgaactccggacctc

SEQ ID NO: 52870 - DNA, 24 bp, Artificial Sequence
  Synthetic: FXN 5 reverse 9:69037205-69037232; SpCas9
ggttagtcttgaactccggacctc

SEQ ID NO: 52871 - DNA, 23 bp, Artificial Sequence
  Synthetic: FXN 5 reverse 9:69037206-69037232; SpCas9
gttagtcttgaactccggacctc

SEQ ID NO: 52872 - DNA, 22 bp, Artificial Sequence
  Synthetic: FXN 5 reverse 9:69037207-69037232; SpCas9
ttagtcttgaactccggacctc

SEQ ID NO: 52873 - DNA, 21 bp, Artificial Sequence
  Synthetic: FXN 5 reverse 9:69037208-69037232; SpCas9
tagtcttgaactccggacctc

SEQ ID NO: 52874 - DNA, 20 bp, Artificial Sequence
  Synthetic: FXN 5 reverse 9:69037209-69037232; SpCas9
agtcttgaactccggacctc

SEQ ID NO: 52875 - DNA, 19 bp, Artificial Sequence
  Synthetic: FXN 5 reverse 9:69037210-69037232; SpCas9
gtcttgaactccggacctc

SEQ ID NO: 52876 - DNA, 18 bp, Artificial Sequence
  Synthetic: FXN 5 reverse 9:69037211-69037232; SpCas9
tcttgaactccggacctc

SEQ ID NO: 52877 - DNA, 25 bp, Artificial Sequence
  Synthetic: FXN 5 reverse 9:69037205-69037233; SpCas9
caggttagtcttgaactccggacct

SEQ ID NO: 52878 - DNA, 24 bp, Artificial Sequence
  Synthetic: FXN 5 reverse 9:69037206-69037233; SpCas9
aggttagtcttgaactccggacct

SEQ ID NO: 52879 - DNA, 23 bp, Artificial Sequence
  Synthetic: FXN 5 reverse 9:69037207-69037233; SpCas9
ggttagtcttgaactccggacct

SEQ ID NO: 52880 - DNA, 22 bp, Artificial Sequence
  Synthetic: FXN 5 reverse 9:69037208-69037233; SpCas9
gttagtcttgaactccggacct

SEQ ID NO: 52881 - DNA, 21 bp, Artificial Sequence
  Synthetic: FXN 5 reverse 9:69037209-69037233; SpCas9
ttagtcttgaactccggacct

SEQ ID NO: 52882 - DNA, 20 bp, Artificial Sequence
  Synthetic: FXN 5 reverse 9:69037210-69037233; SpCas9
tagtcttgaactccggacct

SEQ ID NO: 52883 - DNA, 19 bp, Artificial Sequence
  Synthetic: FXN 5 reverse 9:69037211-69037233; SpCas9
agtcttgaactccggacct

SEQ ID NO: 52884 - DNA, 18 bp, Artificial Sequence
  Synthetic: FXN 5 reverse 9:69037212-69037233; SpCas9
gtcttgaactccggacct

SEQ ID NO: 52885 - DNA, 25 bp, Artificial Sequence
  Synthetic: FXN 5 forward 9:69037206-69037234; SpCas9
tgaggtccggagttcaagactaacc

SEQ ID NO: 52886 - DNA, 24 bp, Artificial Sequence
  Synthetic: FXN 5 forward 9:69037207-69037234; SpCas9
gaggtccggagttcaagactaacc

SEQ ID NO: 52887 - DNA, 23 bp, Artificial Sequence
  Synthetic: FXN 5 forward 9:69037208-69037234; SpCas9
aggtccggagttcaagactaacc

SEQ ID NO: 52888 - DNA, 22 bp, Artificial Sequence
  Synthetic: FXN 5 forward 9:69037209-69037234; SpCas9
ggtccggagttcaagactaacc

SEQ ID NO: 52889 - DNA, 21 bp, Artificial Sequence
  Synthetic: FXN 5 forward 9:69037210-69037234; SpCas9
gtccggagttcaagactaacc

SEQ ID NO: 52890 - DNA, 20 bp, Artificial Sequence
  Synthetic: FXN 5 forward 9:69037211-69037234; SpCas9
tccggagttcaagactaacc

SEQ ID NO: 52891 - DNA, 19 bp, Artificial Sequence
  Synthetic: FXN 5 forward 9:69037212-69037234; SpCas9
ccggagttcaagactaacc

SEQ ID NO: 52892 - DNA, 18 bp, Artificial Sequence
  Synthetic: FXN 5 forward 9:69037213-69037234; SpCas9
cggagttcaagactaacc

SEQ ID NO: 52893 - DNA, 25 bp, Artificial Sequence
  Synthetic: FXN 5 reverse 9:69037212-69037240; SpCas9
tgttggccaggttagtcttgaactc

SEQ ID NO: 52894 - DNA, 24 bp, Artificial Sequence
  Synthetic: FXN 5 reverse 9:69037213-69037240; SpCas9
gttggccaggttagtcttgaactc

SEQ ID NO: 52895 - DNA, 23 bp, Artificial Sequence
  Synthetic: FXN 5 reverse 9:69037214-69037240; SpCas9
ttggccaggttagtcttgaactc

SEQ ID NO: 52896 - DNA, 22 bp, Artificial Sequence
  Synthetic: FXN 5 reverse 9:69037215-69037240; SpCas9
tggccaggttagtcttgaactc

SEQ ID NO: 52897 - DNA, 21 bp, Artificial Sequence
  Synthetic: FXN 5 reverse 9:69037216-69037240; SpCas9
ggccaggttagtcttgaactc

SEQ ID NO: 52898 - DNA, 20 bp, Artificial Sequence
  Synthetic: FXN 5 reverse 9:69037217-69037240; SpCas9
gccaggttagtcttgaactc

SEQ ID NO: 52899 - DNA, 19 bp, Artificial Sequence
  Synthetic: FXN 5 reverse 9:69037218-69037240; SpCas9
ccaggttagtcttgaactc

SEQ ID NO: 52900 - DNA, 18 bp, Artificial Sequence
  Synthetic: FXN 5 reverse 9:69037219-69037240; SpCas9
caggttagtcttgaactc

SEQ ID NO: 52901 - DNA, 25 bp, Artificial Sequence
  Synthetic: FXN 5 forward 9:69037215-69037243; SpCas9
gagttcaagactaacctggccaaca

SEQ ID NO: 52902 - DNA, 24 bp, Artificial Sequence
  Synthetic: FXN 5 forward 9:69037216-69037243; SpCas9
agttcaagactaacctggccaaca

SEQ ID NO: 52903 - DNA, 23 bp, Artificial Sequence
  Synthetic: FXN 5 forward 9:69037217-69037243; SpCas9
gttcaagactaacctggccaaca

SEQ ID NO: 52904 - DNA, 22 bp, Artificial Sequence
  Synthetic: FXN 5 forward 9:69037218-69037243; SpCas9
ttcaagactaacctggccaaca

SEQ ID NO: 52905 - DNA, 21 bp, Artificial Sequence
  Synthetic: FXN 5 forward 9:69037219-69037243; SpCas9
tcaagactaacctggccaaca

SEQ ID NO: 52906 - DNA, 20 bp, Artificial Sequence
  Synthetic: FXN 5 forward 9:69037220-69037243; SpCas9
caagactaacctggccaaca

SEQ ID NO: 52907 - DNA, 19 bp, Artificial Sequence
  Synthetic: FXN 5 forward 9:69037221-69037243; SpCas9
aagactaacctggccaaca

SEQ ID NO: 52908 - DNA, 18 bp, Artificial Sequence
  Synthetic: FXN 5 forward 9:69037222-69037243; SpCas9
agactaacctggccaaca

SEQ ID NO: 52909 - DNA, 25 bp, Artificial Sequence
  Synthetic: FXN 5 forward 9:69037225-69037253; SpCas9
ctaacctggccaacatggtgaaacc

SEQ ID NO: 52910 - DNA, 24 bp, Artificial Sequence
  Synthetic: FXN 5 forward 9:69037226-69037253; SpCas9
taacctggccaacatggtgaaacc

SEQ ID NO: 52911 - DNA, 23 bp, Artificial Sequence
  Synthetic: FXN 5 forward 9:69037227-69037253; SpCas9
aacctggccaacatggtgaaacc

SEQ ID NO: 52912 - DNA, 22 bp, Artificial Sequence
  Synthetic: FXN 5 forward 9:69037228-69037253; SpCas9
acctggccaacatggtgaaacc

SEQ ID NO: 52913 - DNA, 21 bp, Artificial Sequence
  Synthetic: FXN 5 forward 9:69037229-69037253; SpCas9
cctggccaacatggtgaaacc

SEQ ID NO: 52914 - DNA, 20 bp, Artificial Sequence
  Synthetic: FXN 5 forward 9:69037230-69037253; SpCas9
ctggccaacatggtgaaacc

SEQ ID NO: 52915 - DNA, 19 bp, Artificial Sequence
  Synthetic: FXN 5 forward 9:69037231-69037253; SpCas9
tggccaacatggtgaaacc

SEQ ID NO: 52916 - DNA, 18 bp, Artificial Sequence
  Synthetic: FXN 5 forward 9:69037232-69037253; SpCas9
ggccaacatggtgaaacc

SEQ ID NO: 52917 - DNA, 25 bp, Artificial Sequence
  Synthetic: FXN 5 reverse 9:69037225-69037253; SpCas9
ctgggtttcaccatgttggccaggt

SEQ ID NO: 52918 - DNA, 24 bp, Artificial Sequence
  Synthetic: FXN 5 reverse 9:69037226-69037253; SpCas9
tgggtttcaccatgttggccaggt

SEQ ID NO: 52919 - DNA, 23 bp, Artificial Sequence
  Synthetic: FXN 5 reverse 9:69037227-69037253; SpCas9
gggtttcaccatgttggccaggt

SEQ ID NO: 52920 - DNA, 22 bp, Artificial Sequence
  Synthetic: FXN 5 reverse 9:69037228-69037253; SpCas9
ggtttcaccatgttggccaggt

SEQ ID NO: 52921 - DNA, 21 bp, Artificial Sequence
  Synthetic: FXN 5 reverse 9:69037229-69037253; SpCas9
gtttcaccatgttggccaggt

SEQ ID NO: 52922 - DNA, 20 bp, Artificial Sequence
  Synthetic: FXN 5 reverse 9:69037230-69037253; SpCas9
tttcaccatgttggccaggt

SEQ ID NO: 52923 - DNA, 19 bp, Artificial Sequence
  Synthetic: FXN 5 reverse 9:69037231-69037253; SpCas9
ttcaccatgttggccaggt

SEQ ID NO: 52924 - DNA, 18 bp, Artificial Sequence
  Synthetic: FXN 5 reverse 9:69037232-69037253; SpCas9
tcaccatgttggccaggt

SEQ ID NO: 52925 - DNA, 25 bp, Artificial Sequence
  Synthetic: FXN 5 reverse 9:69037229-69037257; SpCas9
gatactgggtttcaccatgttggcc

SEQ ID NO: 52926 - DNA, 24 bp, Artificial Sequence
  Synthetic: FXN 5 reverse 9:69037230-69037257; SpCas9
atactgggtttcaccatgttggcc

SEQ ID NO: 52927 - DNA, 23 bp, Artificial Sequence
  Synthetic: FXN 5 reverse 9:69037231-69037257; SpCas9
tactgggtttcaccatgttggcc

SEQ ID NO: 52928 - DNA, 22 bp, Artificial Sequence
  Synthetic: FXN 5 reverse 9:69037232-69037257; SpCas9
actgggtttcaccatgttggcc

SEQ ID NO: 52929 - DNA, 21 bp, Artificial Sequence
  Synthetic: FXN 5 reverse 9:69037233-69037257; SpCas9
ctgggtttcaccatgttggcc

SEQ ID NO: 52930 - DNA, 20 bp, Artificial Sequence
  Synthetic: FXN 5 reverse 9:69037234-69037257; SpCas9
tgggtttcaccatgttggcc

SEQ ID NO: 52931 - DNA, 19 bp, Artificial Sequence
  Synthetic: FXN 5 reverse 9:69037235-69037257; SpCas9
gggtttcaccatgttggcc

SEQ ID NO: 52932 - DNA, 18 bp, Artificial Sequence
  Synthetic: FXN 5 reverse 9:69037236-69037257; SpCas9
ggtttcaccatgttggcc

SEQ ID NO: 52933 - DNA, 25 bp, Artificial Sequence
  Synthetic: FXN 5 reverse 9:69037230-69037258; SpCas9
agatactgggtttcaccatgttggc

SEQ ID NO: 52934 - DNA, 24 bp, Artificial Sequence
  Synthetic: FXN 5 reverse 9:69037231-69037258; SpCas9
gatactgggtttcaccatgttggc

SEQ ID NO: 52935 - DNA, 23 bp, Artificial Sequence
  Synthetic: FXN 5 reverse 9:69037232-69037258; SpCas9
atactgggtttcaccatgttggc

SEQ ID NO: 52936 - DNA, 22 bp, Artificial Sequence
  Synthetic: FXN 5 reverse 9:69037233-69037258; SpCas9
tactgggtttcaccatgttggc

SEQ ID NO: 52937 - DNA, 21 bp, Artificial Sequence
  Synthetic: FXN 5 reverse 9:69037234-69037258; SpCas9
actgggtttcaccatgttggc

SEQ ID NO: 52938 - DNA, 20 bp, Artificial Sequence
  Synthetic: FXN 5 reverse 9:69037235-69037258; SpCas9
ctgggtttcaccatgttggc

SEQ ID NO: 52939 - DNA, 19 bp, Artificial Sequence
  Synthetic: FXN 5 reverse 9:69037236-69037258; SpCas9
tgggtttcaccatgttggc

SEQ ID NO: 52940 - DNA, 18 bp, Artificial Sequence
  Synthetic: FXN 5 reverse 9:69037237-69037258; SpCas9
gggtttcaccatgttggc

SEQ ID NO: 52941 - DNA, 25 bp, Artificial Sequence
  Synthetic: FXN 5 reverse 9:69037234-69037262; SpCas9
tagtagatactgggtttcaccatgt

SEQ ID NO: 52942 - DNA, 24 bp, Artificial Sequence
  Synthetic: FXN 5 reverse 9:69037235-69037262; SpCas9
agtagatactgggtttcaccatgt

SEQ ID NO: 52943 - DNA, 23 bp, Artificial Sequence
  Synthetic: FXN 5 reverse 9:69037236-69037262; SpCas9
gtagatactgggtttcaccatgt

SEQ ID NO: 52944 - DNA, 22 bp, Artificial Sequence
  Synthetic: FXN 5 reverse 9:69037237-69037262; SpCas9
tagatactgggtttcaccatgt

SEQ ID NO: 52945 - DNA, 21 bp, Artificial Sequence
  Synthetic: FXN 5 reverse 9:69037238-69037262; SpCas9
agatactgggtttcaccatgt

SEQ ID NO: 52946 - DNA, 20 bp, Artificial Sequence
  Synthetic: FXN 5 reverse 9:69037239-69037262; SpCas9
gatactgggtttcaccatgt

SEQ ID NO: 52947 - DNA, 19 bp, Artificial Sequence
  Synthetic: FXN 5 reverse 9:69037240-69037262; SpCas9
atactgggtttcaccatgt

SEQ ID NO: 52948 - DNA, 18 bp, Artificial Sequence
  Synthetic: FXN 5 reverse 9:69037241-69037262; SpCas9
tactgggtttcaccatgt

SEQ ID NO: 52949 - DNA, 25 bp, Artificial Sequence
  Synthetic: FXN 5 reverse 9:69037248-69037276; SpCas9
ttttttgtattttttagtagatact

SEQ ID NO: 52950 - DNA, 24 bp, Artificial Sequence
  Synthetic: FXN 5 reverse 9:69037249-69037276; SpCas9
tttttgtattttttagtagatact

SEQ ID NO: 52951 - DNA, 23 bp, Artificial Sequence
  Synthetic: FXN 5 reverse 9:69037250-69037276; SpCas9
ttttgtattttttagtagatact

SEQ ID NO: 52952 - DNA, 22 bp, Artificial Sequence
  Synthetic: FXN 5 reverse 9:69037251-69037276; SpCas9
tttgtattttttagtagatact

SEQ ID NO: 52953 - DNA, 21 bp, Artificial Sequence
  Synthetic: FXN 5 reverse 9:69037252-69037276; SpCas9
ttgtattttttagtagatact

SEQ ID NO: 52954 - DNA, 20 bp, Artificial Sequence
  Synthetic: FXN 5 reverse 9:69037253-69037276; SpCas9
tgtattttttagtagatact

SEQ ID NO: 52955 - DNA, 19 bp, Artificial Sequence
  Synthetic: FXN 5 reverse 9:69037254-69037276; SpCas9
gtattttttagtagatact

SEQ ID NO: 52956 - DNA, 18 bp, Artificial Sequence
  Synthetic: FXN 5 reverse 9:69037255-69037276; SpCas9
tattttttagtagatact

SEQ ID NO: 52957 - DNA, 25 bp, Artificial Sequence
  Synthetic: FXN 5 reverse 9:69037249-69037277; SpCas9
tttttttgtattttttagtagatac

SEQ ID NO: 52958 - DNA, 24 bp, Artificial Sequence
  Synthetic: FXN 5 reverse 9:69037250-69037277; SpCas9
ttttttgtattttttagtagatac

SEQ ID NO: 52959 - DNA, 23 bp, Artificial Sequence
  Synthetic: FXN 5 reverse 9:69037251-69037277; SpCas9
tttttgtattttttagtagatac

SEQ ID NO: 52960 - DNA, 22 bp, Artificial Sequence
  Synthetic: FXN 5 reverse 9:69037252-69037277; SpCas9
ttttgtattttttagtagatac

SEQ ID NO: 52961 - DNA, 21 bp, Artificial Sequence
  Synthetic: FXN 5 reverse 9:69037253-69037277; SpCas9
tttgtattttttagtagatac

SEQ ID NO: 52962 - DNA, 20 bp, Artificial Sequence
  Synthetic: FXN 5 reverse 9:69037254-69037277; SpCas9
ttgtattttttagtagatac

SEQ ID NO: 52963 - DNA, 19 bp, Artificial Sequence
  Synthetic: FXN 5 reverse 9:69037255-69037277; SpCas9
tgtattttttagtagatac

SEQ ID NO: 52964 - DNA, 18 bp, Artificial Sequence
  Synthetic: FXN 5 reverse 9:69037256-69037277; SpCas9
gtattttttagtagatac

SEQ ID NO: 52965 - DNA, 25 bp, Artificial Sequence
  Synthetic: FXN 5 reverse 9:69037256-69037284; SpCas9
ttttttttttttttgtattttttag

SEQ ID NO: 52966 - DNA, 24 bp, Artificial Sequence
  Synthetic: FXN 5 reverse 9:69037257-69037284; SpCas9
tttttttttttttgtattttttag

SEQ ID NO: 52967 - DNA, 23 bp, Artificial Sequence
  Synthetic: FXN 5 reverse 9:69037258-69037284; SpCas9
ttttttttttttgtattttttag

SEQ ID NO: 52968 - DNA, 22 bp, Artificial Sequence
  Synthetic: FXN 5 reverse 9:69037259-69037284; SpCas9
tttttttttttgtattttttag

SEQ ID NO: 52969 - DNA, 21 bp, Artificial Sequence
  Synthetic: FXN 5 reverse 9:69037260-69037284; SpCas9
ttttttttttgtattttttag

SEQ ID NO: 52970 - DNA, 20 bp, Artificial Sequence
  Synthetic: FXN 5 reverse 9:69037261-69037284; SpCas9
tttttttttgtattttttag

SEQ ID NO: 52971 - DNA, 19 bp, Artificial Sequence
  Synthetic: FXN 5 reverse 9:69037262-69037284; SpCas9
ttttttttgtattttttag

SEQ ID NO: 52972 - DNA, 18 bp, Artificial Sequence
  Synthetic: FXN 5 reverse 9:69037263-69037284; SpCas9
tttttttgtattttttag

SEQ ID NO: 52973 - DNA, 25 bp, Artificial Sequence
  Synthetic: FXN 5 forward 9:69037259-69037287; SpCas9
ctaaaaaatacaaaaaaaaaaaaaa

SEQ ID NO: 52974 - DNA, 24 bp, Artificial Sequence
  Synthetic: FXN 5 forward 9:69037260-69037287; SpCas9
taaaaaatacaaaaaaaaaaaaaa

SEQ ID NO: 52975 - DNA, 23 bp, Artificial Sequence
  Synthetic: FXN 5 forward 9:69037261-69037287; SpCas9
aaaaaatacaaaaaaaaaaaaaa

SEQ ID NO: 52976 - DNA, 22 bp, Artificial Sequence
  Synthetic: FXN 5 forward 9:69037262-69037287; SpCas9
aaaaatacaaaaaaaaaaaaaa

SEQ ID NO: 52977 - DNA, 21 bp, Artificial Sequence
  Synthetic: FXN 5 forward 9:69037263-69037287; SpCas9
aaaatacaaaaaaaaaaaaaa

SEQ ID NO: 52978 - DNA, 20 bp, Artificial Sequence
  Synthetic: FXN 5 forward 9:69037264-69037287; SpCas9
aaatacaaaaaaaaaaaaaa

SEQ ID NO: 52979 - DNA, 19 bp, Artificial Sequence
  Synthetic: FXN 5 forward 9:69037265-69037287; SpCas9
aatacaaaaaaaaaaaaaa

SEQ ID NO: 52980 - DNA, 18 bp, Artificial Sequence
  Synthetic: FXN 5 forward 9:69037266-69037287; SpCas9
atacaaaaaaaaaaaaaa

SEQ ID NO: 52981 - DNA, 25 bp, Artificial Sequence
  Synthetic: FXN 5 reverse 9:69037259-69037287; SpCas9
cttttttttttttttttgtattttt

SEQ ID NO: 52982 - DNA, 24 bp, Artificial Sequence
  Synthetic: FXN 5 reverse 9:69037260-69037287; SpCas9
ttttttttttttttttgtattttt

SEQ ID NO: 52983 - DNA, 23 bp, Artificial Sequence
  Synthetic: FXN 5 reverse 9:69037261-69037287; SpCas9
tttttttttttttttgtattttt

SEQ ID NO: 52984 - DNA, 22 bp, Artificial Sequence
  Synthetic: FXN 5 reverse 9:69037262-69037287; SpCas9
ttttttttttttttgtattttt

SEQ ID NO: 52985 - DNA, 21 bp, Artificial Sequence
  Synthetic: FXN 5 reverse 9:69037263-69037287; SpCas9
tttttttttttttgtattttt

SEQ ID NO: 52986 - DNA, 20 bp, Artificial Sequence
  Synthetic: FXN 5 reverse 9:69037264-69037287; SpCas9
ttttttttttttgtattttt

SEQ ID NO: 52987 - DNA, 19 bp, Artificial Sequence
  Synthetic: FXN 5 reverse 9:69037265-69037287; SpCas9
tttttttttttgtattttt

SEQ ID NO: 52988 - DNA, 18 bp, Artificial Sequence
  Synthetic: FXN 5 reverse 9:69037266-69037287; SpCas9
ttttttttttgtattttt

SEQ ID NO: 52989 - DNA, 25 bp, Artificial Sequence
  Synthetic: FXN 5 forward 9:69037262-69037290; SpCas9
aaaaatacaaaaaaaaaaaaaaaag

SEQ ID NO: 52990 - DNA, 24 bp, Artificial Sequence
  Synthetic: FXN 5 forward 9:69037263-69037290; SpCas9
aaaatacaaaaaaaaaaaaaaaag

SEQ ID NO: 52991 - DNA, 23 bp, Artificial Sequence
  Synthetic: FXN 5 forward 9:69037264-69037290; SpCas9
aaatacaaaaaaaaaaaaaaaag

SEQ ID NO: 52992 - DNA, 22 bp, Artificial Sequence
  Synthetic: FXN 5 forward 9:69037265-69037290; SpCas9
aatacaaaaaaaaaaaaaaaag

SEQ ID NO: 52993 - DNA, 21 bp, Artificial Sequence
  Synthetic: FXN 5 forward 9:69037266-69037290; SpCas9
atacaaaaaaaaaaaaaaaag

SEQ ID NO: 52994 - DNA, 20 bp, Artificial Sequence
  Synthetic: FXN 5 forward 9:69037267-69037290; SpCas9
tacaaaaaaaaaaaaaaaag

SEQ ID NO: 52995 - DNA, 19 bp, Artificial Sequence
  Synthetic: FXN 5 forward 9:69037268-69037290; SpCas9
acaaaaaaaaaaaaaaaag

SEQ ID NO: 52996 - DNA, 18 bp, Artificial Sequence
  Synthetic: FXN 5 forward 9:69037269-69037290; SpCas9
caaaaaaaaaaaaaaaag

SEQ ID NO: 52997 - DNA, 25 bp, Artificial Sequence
  Synthetic: FXN 5 forward 9:69037265-69037293; SpCas9
aatacaaaaaaaaaaaaaaaagaag

SEQ ID NO: 52998 - DNA, 24 bp, Artificial Sequence
  Synthetic: FXN 5 forward 9:69037266-69037293; SpCas9
atacaaaaaaaaaaaaaaaagaag

SEQ ID NO: 52999 - DNA, 23 bp, Artificial Sequence
  Synthetic: FXN 5 forward 9:69037267-69037293; SpCas9
tacaaaaaaaaaaaaaaaagaag

SEQ ID NO: 53000 - DNA, 22 bp, Artificial Sequence
  Synthetic: FXN 5 forward 9:69037268-69037293; SpCas9
acaaaaaaaaaaaaaaaagaag

SEQ ID NO: 53001 - DNA, 21 bp, Artificial Sequence
  Synthetic: FXN 5 forward 9:69037269-69037293; SpCas9
caaaaaaaaaaaaaaaagaag

SEQ ID NO: 53002 - DNA, 20 bp, Artificial Sequence
  Synthetic: FXN 5 forward 9:69037270-69037293; SpCas9
aaaaaaaaaaaaaaaagaag

SEQ ID NO: 53003 - DNA, 19 bp, Artificial Sequence
  Synthetic: FXN 5 forward 9:69037271-69037293; SpCas9
aaaaaaaaaaaaaaagaag

SEQ ID NO: 53004 - DNA, 18 bp, Artificial Sequence
  Synthetic: FXN 5 forward 9:69037272-69037293; SpCas9
aaaaaaaaaaaaaagaag

SEQ ID NO: 53005 - DNA, 25 bp, Artificial Sequence
  Synthetic: FXN 5 forward 9:69037268-69037296; SpCas9
acaaaaaaaaaaaaaaaagaagaag

SEQ ID NO: 53006 - DNA, 24 bp, Artificial Sequence
  Synthetic: FXN 5 forward 9:69037269-69037296; SpCas9
caaaaaaaaaaaaaaaagaagaag

SEQ ID NO: 53007 - DNA, 23 bp, Artificial Sequence
  Synthetic: FXN 5 forward 9:69037270-69037296; SpCas9
aaaaaaaaaaaaaaaagaagaag

SEQ ID NO: 53008 - DNA, 22 bp, Artificial Sequence
  Synthetic: FXN 5 forward 9:69037271-69037296; SpCas9
aaaaaaaaaaaaaaagaagaag

SEQ ID NO: 53009 - DNA, 21 bp, Artificial Sequence
  Synthetic: FXN 5 forward 9:69037272-69037296; SpCas9
aaaaaaaaaaaaaagaagaag

SEQ ID NO: 53010 - DNA, 20 bp, Artificial Sequence
  Synthetic: FXN 5 forward 9:69037273-69037296; SpCas9
aaaaaaaaaaaaagaagaag

SEQ ID NO: 53011 - DNA, 19 bp, Artificial Sequence
  Synthetic: FXN 5 forward 9:69037274-69037296; SpCas9
aaaaaaaaaaaagaagaag

SEQ ID NO: 53012 - DNA, 18 bp, Artificial Sequence
  Synthetic: FXN 5 forward 9:69037275-69037296; SpCas9
aaaaaaaaaaagaagaag

SEQ ID NO: 53013 - DNA, 25 bp, Artificial Sequence
  Synthetic: FXN 5 forward 9:69037271-69037299; SpCas9
aaaaaaaaaaaaaaagaagaagaag

SEQ ID NO: 53014 - DNA, 24 bp, Artificial Sequence
  Synthetic: FXN 5 forward 9:69037272-69037299; SpCas9
aaaaaaaaaaaaaagaagaagaag

SEQ ID NO: 53015 - DNA, 23 bp, Artificial Sequence
  Synthetic: FXN 5 forward 9:69037273-69037299; SpCas9
aaaaaaaaaaaaagaagaagaag

SEQ ID NO: 53016 - DNA, 22 bp, Artificial Sequence
  Synthetic: FXN 5 forward 9:69037274-69037299; SpCas9
aaaaaaaaaaaagaagaagaag

SEQ ID NO: 53017 - DNA, 21 bp, Artificial Sequence
  Synthetic: FXN 5 forward 9:69037275-69037299; SpCas9
aaaaaaaaaaagaagaagaag

SEQ ID NO: 53018 - DNA, 20 bp, Artificial Sequence
  Synthetic: FXN 5 forward 9:69037276-69037299; SpCas9
aaaaaaaaaagaagaagaag

SEQ ID NO: 53019 - DNA, 19 bp, Artificial Sequence
  Synthetic: FXN 5 forward 9:69037277-69037299; SpCas9
aaaaaaaaagaagaagaag

SEQ ID NO: 53020 - DNA, 18 bp, Artificial Sequence
  Synthetic: FXN 5 forward 9:69037278-69037299; SpCas9
aaaaaaaagaagaagaag

SEQ ID NO: 53021 - DNA, 25 bp, Artificial Sequence
  Synthetic: FXN 5 forward 9:69037274-69037302; SpCas9
aaaaaaaaaaaagaagaagaagaag

SEQ ID NO: 53022 - DNA, 24 bp, Artificial Sequence
  Synthetic: FXN 5 forward 9:69037275-69037302; SpCas9
aaaaaaaaaaagaagaagaagaag

SEQ ID NO: 53023 - DNA, 23 bp, Artificial Sequence
  Synthetic: FXN 5 forward 9:69037276-69037302; SpCas9
aaaaaaaaaagaagaagaagaag

SEQ ID NO: 53024 - DNA, 22 bp, Artificial Sequence
  Synthetic: FXN 5 forward 9:69037277-69037302; SpCas9
aaaaaaaaagaagaagaagaag

SEQ ID NO: 53025 - DNA, 21 bp, Artificial Sequence
  Synthetic: FXN 5 forward 9:69037278-69037302; SpCas9
aaaaaaaagaagaagaagaag

SEQ ID NO: 53026 - DNA, 20 bp, Artificial Sequence
  Synthetic: FXN 5 forward 9:69037279-69037302; SpCas9
aaaaaaagaagaagaagaag

SEQ ID NO: 53027 - DNA, 19 bp, Artificial Sequence
  Synthetic: FXN 5 forward 9:69037280-69037302; SpCas9
aaaaaagaagaagaagaag

SEQ ID NO: 53028 - DNA, 18 bp, Artificial Sequence
  Synthetic: FXN 5 forward 9:69037281-69037302; SpCas9
aaaaagaagaagaagaag

SEQ ID NO: 53029 - DNA, 18 bp, Artificial Sequence
  Synthetic: FXN O reverse 9:69037281-69037303; As/LbCpf1
ttttcttcttcttcttct

SEQ ID NO: 53030 - DNA, 19 bp, Artificial Sequence
  Synthetic: FXN O reverse 9:69037281-69037304; As/LbCpf1
ttttcttcttcttcttctt

SEQ ID NO: 53031 - DNA, 20 bp, Artificial Sequence
  Synthetic: FXN O reverse 9:69037281-69037305; As/LbCpf1
ttttcttcttcttcttcttc

SEQ ID NO: 53032 - DNA, 21 bp, Artificial Sequence
  Synthetic: FXN O reverse 9:69037281-69037306; As/LbCpf1
ttttcttcttcttcttcttct

SEQ ID NO: 53033 - DNA, 22 bp, Artificial Sequence
  Synthetic: FXN O reverse 9:69037281-69037307; As/LbCpf1
ttttcttcttcttcttcttctt

SEQ ID NO: 53034 - DNA, 23 bp, Artificial Sequence
  Synthetic: FXN O reverse 9:69037281-69037308; As/LbCpf1
ttttcttcttcttcttcttcttt

SEQ ID NO: 53035 - DNA, 24 bp, Artificial Sequence
  Synthetic: FXN O reverse 9:69037281-69037309; As/LbCpf1
ttttcttcttcttcttcttctttt

SEQ ID NO: 53036 - DNA, 25 bp, Artificial Sequence
  Synthetic: FXN O reverse 9:69037281-69037310; As/LbCpf1
ttttcttcttcttcttcttcttttt

SEQ ID NO: 53037 - DNA, 18 bp, Artificial Sequence
  Synthetic: FXN O reverse 9:69037285-69037307; As/LbCpf1
tttattttcttcttcttc

SEQ ID NO: 53038 - DNA, 19 bp, Artificial Sequence
  Synthetic: FXN O reverse 9:69037285-69037308; As/LbCpf1
tttattttcttcttcttct

SEQ ID NO: 53039 - DNA, 20 bp, Artificial Sequence
  Synthetic: FXN O reverse 9:69037285-69037309; As/LbCpf1
tttattttcttcttcttctt

SEQ ID NO: 53040 - DNA, 21 bp, Artificial Sequence
  Synthetic: FXN O reverse 9:69037285-69037310; As/LbCpf1
tttattttcttcttcttcttc

SEQ ID NO: 53041 - DNA, 22 bp, Artificial Sequence
  Synthetic: FXN O reverse 9:69037285-69037311; As/LbCpf1
tttattttcttcttcttcttct

SEQ ID NO: 53042 - DNA, 23 bp, Artificial Sequence
  Synthetic: FXN O reverse 9:69037285-69037312; As/LbCpf1
tttattttcttcttcttcttctt

SEQ ID NO: 53043 - DNA, 24 bp, Artificial Sequence
  Synthetic: FXN O reverse 9:69037285-69037313; As/LbCpf1
tttattttcttcttcttcttcttc

SEQ ID NO: 53044 - DNA, 25 bp, Artificial Sequence
  Synthetic: FXN O reverse 9:69037285-69037314; As/LbCpf1
tttattttcttcttcttcttcttct

SEQ ID NO: 53045 - DNA, 18 bp, Artificial Sequence
  Synthetic: FXN O forward 9:69046372-69046394; As/LbCpf1
gctttcagagttcgaacc

SEQ ID NO: 53046 - DNA, 19 bp, Artificial Sequence
  Synthetic: FXN O forward 9:69046372-69046395; As/LbCpf1
gctttcagagttcgaacca

SEQ ID NO: 53047 - DNA, 20 bp, Artificial Sequence
  Synthetic: FXN O forward 9:69046372-69046396; As/LbCpf1
gctttcagagttcgaaccaa

SEQ ID NO: 53048 - DNA, 21 bp, Artificial Sequence
  Synthetic: FXN O forward 9:69046372-69046397; As/LbCpf1
gctttcagagttcgaaccaac

SEQ ID NO: 53049 - DNA, 22 bp, Artificial Sequence
  Synthetic: FXN O forward 9:69046372-69046398; As/LbCpf1
gctttcagagttcgaaccaacg

SEQ ID NO: 53050 - DNA, 23 bp, Artificial Sequence
  Synthetic: FXN O forward 9:69046372-69046399; As/LbCpf1
gctttcagagttcgaaccaacgt

SEQ ID NO: 53051 - DNA, 24 bp, Artificial Sequence
  Synthetic: FXN O forward 9:69046372-69046400; As/LbCpf1
gctttcagagttcgaaccaacgtg

SEQ ID NO: 53052 - DNA, 25 bp, Artificial Sequence
  Synthetic: FXN O forward 9:69046372-69046401; As/LbCpf1
gctttcagagttcgaaccaacgtgg

SEQ ID NO: 53053 - DNA, 18 bp, Artificial Sequence
  Synthetic: FXN O forward 9:69046378-69046400; As/LbCpf1
agagttcgaaccaacgtg

SEQ ID NO: 53054 - DNA, 19 bp, Artificial Sequence
  Synthetic: FXN O forward 9:69046378-69046401; As/LbCpf1
agagttcgaaccaacgtgg

SEQ ID NO: 53055 - DNA, 20 bp, Artificial Sequence
  Synthetic: FXN O forward 9:69046378-69046402; As/LbCpf1
agagttcgaaccaacgtggc

SEQ ID NO: 53056 - DNA, 21 bp, Artificial Sequence
  Synthetic: FXN O forward 9:69046378-69046403; As/LbCpf1
agagttcgaaccaacgtggcc

SEQ ID NO: 53057 - DNA, 22 bp, Artificial Sequence
  Synthetic: FXN O forward 9:69046378-69046404; As/LbCpf1
agagttcgaaccaacgtggcct

SEQ ID NO: 53058 - DNA, 23 bp, Artificial Sequence
  Synthetic: FXN O forward 9:69046378-69046405; As/LbCpf1
agagttcgaaccaacgtggcctc

SEQ ID NO: 53059 - DNA, 24 bp, Artificial Sequence
  Synthetic: FXN O forward 9:69046378-69046406; As/LbCpf1
agagttcgaaccaacgtggcctca

SEQ ID NO: 53060 - DNA, 25 bp, Artificial Sequence
  Synthetic: FXN O forward 9:69046378-69046407; As/LbCpf1
agagttcgaaccaacgtggcctcaa

SEQ ID NO: 53061 - DNA, 18 bp, Artificial Sequence
  Synthetic: FXN O reverse 9:69046397-69046419; As/LbCpf1
acattccaaatctggttg

SEQ ID NO: 53062 - DNA, 19 bp, Artificial Sequence
  Synthetic: FXN O reverse 9:69046397-69046420; As/LbCpf1
acattccaaatctggttga

SEQ ID NO: 53063 - DNA, 20 bp, Artificial Sequence
  Synthetic: FXN O reverse 9:69046397-69046421; As/LbCpf1
acattccaaatctggttgag

SEQ ID NO: 53064 - DNA, 21 bp, Artificial Sequence
  Synthetic: FXN O reverse 9:69046397-69046422; As/LbCpf1
acattccaaatctggttgagg

SEQ ID NO: 53065 - DNA, 22 bp, Artificial Sequence
  Synthetic: FXN O reverse 9:69046397-69046423; As/LbCpf1
acattccaaatctggttgaggc

SEQ ID NO: 53066 - DNA, 23 bp, Artificial Sequence
  Synthetic: FXN O reverse 9:69046397-69046424; As/LbCpf1
acattccaaatctggttgaggcc

SEQ ID NO: 53067 - DNA, 24 bp, Artificial Sequence
  Synthetic: FXN O reverse 9:69046397-69046425; As/LbCpf1
acattccaaatctggttgaggcca

SEQ ID NO: 53068 - DNA, 25 bp, Artificial Sequence
  Synthetic: FXN O reverse 9:69046397-69046426; As/LbCpf1
acattccaaatctggttgaggccac

SEQ ID NO: 53069 - DNA, 18 bp, Artificial Sequence
  Synthetic: FXN O reverse 9:69046398-69046420; As/LbCpf1
gacattccaaatctggtt

SEQ ID NO: 53070 - DNA, 19 bp, Artificial Sequence
  Synthetic: FXN O reverse 9:69046398-69046421; As/LbCpf1
gacattccaaatctggttg

SEQ ID NO: 53071 - DNA, 20 bp, Artificial Sequence
  Synthetic: FXN O reverse 9:69046398-69046422; As/LbCpf1
gacattccaaatctggttga

SEQ ID NO: 53072 - DNA, 21 bp, Artificial Sequence
  Synthetic: FXN O reverse 9:69046398-69046423; As/LbCpf1
gacattccaaatctggttgag

SEQ ID NO: 53073 - DNA, 22 bp, Artificial Sequence
  Synthetic: FXN O reverse 9:69046398-69046424; As/LbCpf1
gacattccaaatctggttgagg

SEQ ID NO: 53074 - DNA, 23 bp, Artificial Sequence
  Synthetic: FXN O reverse 9:69046398-69046425; As/LbCpf1
gacattccaaatctggttgaggc

SEQ ID NO: 53075 - DNA, 24 bp, Artificial Sequence
  Synthetic: FXN O reverse 9:69046398-69046426; As/LbCpf1
gacattccaaatctggttgaggcc

SEQ ID NO: 53076 - DNA, 25 bp, Artificial Sequence
  Synthetic: FXN O reverse 9:69046398-69046427; As/LbCpf1
gacattccaaatctggttgaggcca

SEQ ID NO: 53077 - DNA, 18 bp, Artificial Sequence
  Synthetic: FXN O reverse 9:69046399-69046421; As/LbCpf1
tgacattccaaatctggt

SEQ ID NO: 53078 - DNA, 19 bp, Artificial Sequence
  Synthetic: FXN O reverse 9:69046399-69046422; As/LbCpf1
tgacattccaaatctggtt

SEQ ID NO: 53079 - DNA, 20 bp, Artificial Sequence
  Synthetic: FXN O reverse 9:69046399-69046423; As/LbCpf1
tgacattccaaatctggttg

SEQ ID NO: 53080 - DNA, 21 bp, Artificial Sequence
  Synthetic: FXN O reverse 9:69046399-69046424; As/LbCpf1
tgacattccaaatctggttga

SEQ ID NO: 53081 - DNA, 22 bp, Artificial Sequence
  Synthetic: FXN O reverse 9:69046399-69046425; As/LbCpf1
tgacattccaaatctggttgag

SEQ ID NO: 53082 - DNA, 23 bp, Artificial Sequence
  Synthetic: FXN O reverse 9:69046399-69046426; As/LbCpf1
tgacattccaaatctggttgagg

SEQ ID NO: 53083 - DNA, 24 bp, Artificial Sequence
  Synthetic: FXN O reverse 9:69046399-69046427; As/LbCpf1
tgacattccaaatctggttgaggc

SEQ ID NO: 53084 - DNA, 25 bp, Artificial Sequence
  Synthetic: FXN O reverse 9:69046399-69046428; As/LbCpf1
tgacattccaaatctggttgaggcc

SEQ ID NO: 53085 - DNA, 18 bp, Artificial Sequence
  Synthetic: FXN O reverse 9:69035937-69035959; AsCpf1-1
ggcgcggatacttactgc

SEQ ID NO: 53086 - DNA, 19 bp, Artificial Sequence
  Synthetic: FXN O reverse 9:69035937-69035960; AsCpf1-1
ggcgcggatacttactgcg

SEQ ID NO: 53087 - DNA, 20 bp, Artificial Sequence
  Synthetic: FXN O reverse 9:69035937-69035961; AsCpf1-1
ggcgcggatacttactgcgc

SEQ ID NO: 53088 - DNA, 21 bp, Artificial Sequence
  Synthetic: FXN O reverse 9:69035937-69035962; AsCpf1-1
ggcgcggatacttactgcgcg

SEQ ID NO: 53089 - DNA, 22 bp, Artificial Sequence
  Synthetic: FXN O reverse 9:69035937-69035963; AsCpf1-1
ggcgcggatacttactgcgcgg

SEQ ID NO: 53090 - DNA, 23 bp, Artificial Sequence
  Synthetic: FXN O reverse 9:69035937-69035964; AsCpf1-1
ggcgcggatacttactgcgcggc

SEQ ID NO: 53091 - DNA, 24 bp, Artificial Sequence
  Synthetic: FXN O reverse 9:69035937-69035965; AsCpf1-1
ggcgcggatacttactgcgcggcg

SEQ ID NO: 53092 - DNA, 25 bp, Artificial Sequence
  Synthetic: FXN O reverse 9:69035937-69035966; AsCpf1-1
ggcgcggatacttactgcgcggcgg

SEQ ID NO: 53093 - DNA, 18 bp, Artificial Sequence
  Synthetic: FXN O reverse 9:69035938-69035960; AsCpf1-1
cggcgcggatacttactg

SEQ ID NO: 53094 - DNA, 19 bp, Artificial Sequence
  Synthetic: FXN O reverse 9:69035938-69035961; AsCpf1-1
cggcgcggatacttactgc

SEQ ID NO: 53095 - DNA, 20 bp, Artificial Sequence
  Synthetic: FXN O reverse 9:69035938-69035962; AsCpf1-1
cggcgcggatacttactgcg

SEQ ID NO: 53096 - DNA, 21 bp, Artificial Sequence
  Synthetic: FXN O reverse 9:69035938-69035963; AsCpf1-1
cggcgcggatacttactgcgc

SEQ ID NO: 53097 - DNA, 22 bp, Artificial Sequence
  Synthetic: FXN O reverse 9:69035938-69035964; AsCpf1-1
cggcgcggatacttactgcgcg

SEQ ID NO: 53098 - DNA, 23 bp, Artificial Sequence
  Synthetic: FXN O reverse 9:69035938-69035965; AsCpf1-1
cggcgcggatacttactgcgcgg

SEQ ID NO: 53099 - DNA, 24 bp, Artificial Sequence
  Synthetic: FXN O reverse 9:69035938-69035966; AsCpf1-1
cggcgcggatacttactgcgcggc

SEQ ID NO: 53100 - DNA, 25 bp, Artificial Sequence
  Synthetic: FXN O reverse 9:69035938-69035967; AsCpf1-1
cggcgcggatacttactgcgcggcg

SEQ ID NO: 53101 - DNA, 18 bp, Artificial Sequence
  Synthetic: FXN O forward 9:69046379-69046401; AsCpf1-1
gagttcgaaccaacgtgg

SEQ ID NO: 53102 - DNA, 19 bp, Artificial Sequence
  Synthetic: FXN O forward 9:69046379-69046402; AsCpf1-1
gagttcgaaccaacgtggc

SEQ ID NO: 53103 - DNA, 20 bp, Artificial Sequence
  Synthetic: FXN O forward 9:69046379-69046403; AsCpf1-1
gagttcgaaccaacgtggcc

SEQ ID NO: 53104 - DNA, 21 bp, Artificial Sequence
  Synthetic: FXN O forward 9:69046379-69046404; AsCpf1-1
gagttcgaaccaacgtggcct

SEQ ID NO: 53105 - DNA, 22 bp, Artificial Sequence
  Synthetic: FXN O forward 9:69046379-69046405; AsCpf1-1
gagttcgaaccaacgtggcctc

SEQ ID NO: 53106 - DNA, 23 bp, Artificial Sequence
  Synthetic: FXN O forward 9:69046379-69046406; AsCpf1-1
gagttcgaaccaacgtggcctca

SEQ ID NO: 53107 - DNA, 24 bp, Artificial Sequence
  Synthetic: FXN O forward 9:69046379-69046407; AsCpf1-1
gagttcgaaccaacgtggcctcaa

SEQ ID NO: 53108 - DNA, 25 bp, Artificial Sequence
  Synthetic: FXN O forward 9:69046379-69046408; AsCpf1-1
gagttcgaaccaacgtggcctcaac

SEQ ID NO: 53109 - DNA, 18 bp, Artificial Sequence
  Synthetic: FXN O forward 9:69046386-69046408; AsCpf1-1
aaccaacgtggcctcaac

SEQ ID NO: 53110 - DNA, 19 bp, Artificial Sequence
  Synthetic: FXN O forward 9:69046386-69046409; AsCpf1-1
aaccaacgtggcctcaacc

SEQ ID NO: 53111 - DNA, 20 bp, Artificial Sequence
  Synthetic: FXN O forward 9:69046386-69046410; AsCpf1-1
aaccaacgtggcctcaacca

SEQ ID NO: 53112 - DNA, 21 bp, Artificial Sequence
  Synthetic: FXN O forward 9:69046386-69046411; AsCpf1-1
aaccaacgtggcctcaaccag

SEQ ID NO: 53113 - DNA, 22 bp, Artificial Sequence
  Synthetic: FXN O forward 9:69046386-69046412; AsCpf1-1
aaccaacgtggcctcaaccaga

SEQ ID NO: 53114 - DNA, 23 bp, Artificial Sequence
  Synthetic: FXN O forward 9:69046386-69046413; AsCpf1-1
aaccaacgtggcctcaaccagat

SEQ ID NO: 53115 - DNA, 24 bp, Artificial Sequence
  Synthetic: FXN O forward 9:69046386-69046414; AsCpf1-1
aaccaacgtggcctcaaccagatt

SEQ ID NO: 53116 - DNA, 25 bp, Artificial Sequence
  Synthetic: FXN O forward 9:69046386-69046415; AsCpf1-1
aaccaacgtggcctcaaccagattt

SEQ ID NO: 53117 - DNA, 18 bp, Artificial Sequence
  Synthetic: FXN O reverse 9:69046389-69046411; AsCpf1-1
aatctggttgaggccacg

SEQ ID NO: 53118 - DNA, 19 bp, Artificial Sequence
  Synthetic: FXN O reverse 9:69046389-69046412; AsCpf1-1
aatctggttgaggccacgt

SEQ ID NO: 53119 - DNA, 20 bp, Artificial Sequence
  Synthetic: FXN O reverse 9:69046389-69046413; AsCpf1-1
aatctggttgaggccacgtt

SEQ ID NO: 53120 - DNA, 21 bp, Artificial Sequence
  Synthetic: FXN O reverse 9:69046389-69046414; AsCpf1-1
aatctggttgaggccacgttg

SEQ ID NO: 53121 - DNA, 22 bp, Artificial Sequence
  Synthetic: FXN O reverse 9:69046389-69046415; AsCpf1-1
aatctggttgaggccacgttgg

SEQ ID NO: 53122 - DNA, 23 bp, Artificial Sequence
  Synthetic: FXN O reverse 9:69046389-69046416; AsCpf1-1
aatctggttgaggccacgttggt

SEQ ID NO: 53123 - DNA, 24 bp, Artificial Sequence
  Synthetic: FXN O reverse 9:69046389-69046417; AsCpf1-1
aatctggttgaggccacgttggtt

SEQ ID NO: 53124 - DNA, 25 bp, Artificial Sequence
  Synthetic: FXN O reverse 9:69046389-69046418; AsCpf1-1
aatctggttgaggccacgttggttc

SEQ ID NO: 53125 - DNA, 18 bp, Artificial Sequence
  Synthetic: FXN O reverse 9:69046390-69046412; AsCpf1-1
aaatctggttgaggccac

SEQ ID NO: 53126 - DNA, 19 bp, Artificial Sequence
  Synthetic: FXN O reverse 9:69046390-69046413; AsCpf1-1
aaatctggttgaggccacg

SEQ ID NO: 53127 - DNA, 20 bp, Artificial Sequence
  Synthetic: FXN O reverse 9:69046390-69046414; AsCpf1-1
aaatctggttgaggccacgt

SEQ ID NO: 53128 - DNA, 21 bp, Artificial Sequence
  Synthetic: FXN O reverse 9:69046390-69046415; AsCpf1-1
aaatctggttgaggccacgtt

SEQ ID NO: 53129 - DNA, 22 bp, Artificial Sequence
  Synthetic: FXN O reverse 9:69046390-69046416; AsCpf1-1
aaatctggttgaggccacgttg

SEQ ID NO: 53130 - DNA, 23 bp, Artificial Sequence
  Synthetic: FXN O reverse 9:69046390-69046417; AsCpf1-1
aaatctggttgaggccacgttgg

SEQ ID NO: 53131 - DNA, 24 bp, Artificial Sequence
  Synthetic: FXN O reverse 9:69046390-69046418; AsCpf1-1
aaatctggttgaggccacgttggt

SEQ ID NO: 53132 - DNA, 25 bp, Artificial Sequence
  Synthetic: FXN O reverse 9:69046390-69046419; AsCpf1-1
aaatctggttgaggccacgttggtt

SEQ ID NO: 53133 - DNA, 25 bp, Artificial Sequence
  Synthetic: FXN O reverse 9:69035934-69035965; SaCas9
cccggcgcggatacttactgcgcgg

SEQ ID NO: 53134 - DNA, 24 bp, Artificial Sequence
  Synthetic: FXN O reverse 9:69035935-69035965; SaCas9
ccggcgcggatacttactgcgcgg

SEQ ID NO: 53135 - DNA, 23 bp, Artificial Sequence
  Synthetic: FXN O reverse 9:69035936-69035965; SaCas9
cggcgcggatacttactgcgcgg

SEQ ID NO: 53136 - DNA, 22 bp, Artificial Sequence
  Synthetic: FXN O reverse 9:69035937-69035965; SaCas9
ggcgcggatacttactgcgcgg

SEQ ID NO: 53137 - DNA, 21 bp, Artificial Sequence
  Synthetic: FXN O reverse 9:69035938-69035965; SaCas9
gcgcggatacttactgcgcgg

SEQ ID NO: 53138 - DNA, 20 bp, Artificial Sequence
  Synthetic: FXN O reverse 9:69035939-69035965; SaCas9
cgcggatacttactgcgcgg

SEQ ID NO: 53139 - DNA, 19 bp, Artificial Sequence
  Synthetic: FXN O reverse 9:69035940-69035965; SaCas9
gcggatacttactgcgcgg

SEQ ID NO: 53140 - DNA, 18 bp, Artificial Sequence
  Synthetic: FXN O reverse 9:69035941-69035965; SaCas9
cggatacttactgcgcgg

SEQ ID NO: 53141 - DNA, 25 bp, Artificial Sequence
  Synthetic: FXN O reverse 9:69035935-69035966; SaCas9
tcccggcgcggatacttactgcgcg

SEQ ID NO: 53142 - DNA, 24 bp, Artificial Sequence
  Synthetic: FXN O reverse 9:69035936-69035966; SaCas9
cccggcgcggatacttactgcgcg

SEQ ID NO: 53143 - DNA, 23 bp, Artificial Sequence
  Synthetic: FXN O reverse 9:69035937-69035966; SaCas9
ccggcgcggatacttactgcgcg

SEQ ID NO: 53144 - DNA, 22 bp, Artificial Sequence
  Synthetic: FXN O reverse 9:69035938-69035966; SaCas9
cggcgcggatacttactgcgcg

SEQ ID NO: 53145 - DNA, 21 bp, Artificial Sequence
  Synthetic: FXN O reverse 9:69035939-69035966; SaCas9
ggcgcggatacttactgcgcg

SEQ ID NO: 53146 - DNA, 20 bp, Artificial Sequence
  Synthetic: FXN O reverse 9:69035940-69035966; SaCas9
gcgcggatacttactgcgcg

SEQ ID NO: 53147 - DNA, 19 bp, Artificial Sequence
  Synthetic: FXN O reverse 9:69035941-69035966; SaCas9
cgcggatacttactgcgcg

SEQ ID NO: 53148 - DNA, 18 bp, Artificial Sequence
  Synthetic: FXN O reverse 9:69035942-69035966; SaCas9
gcggatacttactgcgcg

SEQ ID NO: 53149 - DNA, 25 bp, Artificial Sequence
  Synthetic: FXN O forward 9:69037274-69037305; SaCas9
aaaaaaaaaaaagaagaagaagaag

SEQ ID NO: 53150 - DNA, 24 bp, Artificial Sequence
  Synthetic: FXN O forward 9:69037275-69037305; SaCas9
aaaaaaaaaaagaagaagaagaag

SEQ ID NO: 53151 - DNA, 23 bp, Artificial Sequence
  Synthetic: FXN O forward 9:69037276-69037305; SaCas9
aaaaaaaaaagaagaagaagaag

SEQ ID NO: 53152 - DNA, 22 bp, Artificial Sequence
  Synthetic: FXN O forward 9:69037277-69037305; SaCas9
aaaaaaaaagaagaagaagaag

SEQ ID NO: 53153 - DNA, 21 bp, Artificial Sequence
  Synthetic: FXN O forward 9:69037278-69037305; SaCas9
aaaaaaaagaagaagaagaag

SEQ ID NO: 53154 - DNA, 20 bp, Artificial Sequence
  Synthetic: FXN O forward 9:69037279-69037305; SaCas9
aaaaaaagaagaagaagaag

SEQ ID NO: 53155 - DNA, 19 bp, Artificial Sequence
  Synthetic: FXN O forward 9:69037280-69037305; SaCas9
aaaaaagaagaagaagaag

SEQ ID NO: 53156 - DNA, 18 bp, Artificial Sequence
  Synthetic: FXN O forward 9:69037281-69037305; SaCas9
aaaaagaagaagaagaag

SEQ ID NO: 53157 - DNA, 25 bp, Artificial Sequence
  Synthetic: FXN O forward 9:69037283-69037314; SaCas9
aaagaagaagaagaagaagaaaata

SEQ ID NO: 53158 - DNA, 24 bp, Artificial Sequence
  Synthetic: FXN O forward 9:69037284-69037314; SaCas9
aagaagaagaagaagaagaaaata

SEQ ID NO: 53159 - DNA, 23 bp, Artificial Sequence
  Synthetic: FXN O forward 9:69037285-69037314; SaCas9
agaagaagaagaagaagaaaata

SEQ ID NO: 53160 - DNA, 22 bp, Artificial Sequence
  Synthetic: FXN O forward 9:69037286-69037314; SaCas9
gaagaagaagaagaagaaaata

SEQ ID NO: 53161 - DNA, 21 bp, Artificial Sequence
  Synthetic: FXN O forward 9:69037287-69037314; SaCas9
aagaagaagaagaagaaaata

SEQ ID NO: 53162 - DNA, 20 bp, Artificial Sequence
  Synthetic: FXN O forward 9:69037288-69037314; SaCas9
agaagaagaagaagaaaata

SEQ ID NO: 53163 - DNA, 19 bp, Artificial Sequence
  Synthetic: FXN O forward 9:69037289-69037314; SaCas9
gaagaagaagaagaaaata

SEQ ID NO: 53164 - DNA, 18 bp, Artificial Sequence
  Synthetic: FXN O forward 9:69037290-69037314; SaCas9
aagaagaagaagaaaata

SEQ ID NO: 53165 - DNA, 25 bp, Artificial Sequence
  Synthetic: FXN O reverse 9:69046378-69046409; SaCas9
ggttgaggccacgttggttcgaact

SEQ ID NO: 53166 - DNA, 24 bp, Artificial Sequence
  Synthetic: FXN O reverse 9:69046379-69046409; SaCas9
gttgaggccacgttggttcgaact

SEQ ID NO: 53167 - DNA, 23 bp, Artificial Sequence
  Synthetic: FXN O reverse 9:69046380-69046409; SaCas9
ttgaggccacgttggttcgaact

SEQ ID NO: 53168 - DNA, 22 bp, Artificial Sequence
  Synthetic: FXN O reverse 9:69046381-69046409; SaCas9
tgaggccacgttggttcgaact

SEQ ID NO: 53169 - DNA, 21 bp, Artificial Sequence
  Synthetic: FXN O reverse 9:69046382-69046409; SaCas9
gaggccacgttggttcgaact

SEQ ID NO: 53170 - DNA, 20 bp, Artificial Sequence
  Synthetic: FXN O reverse 9:69046383-69046409; SaCas9
aggccacgttggttcgaact

SEQ ID NO: 53171 - DNA, 19 bp, Artificial Sequence
  Synthetic: FXN O reverse 9:69046384-69046409; SaCas9
ggccacgttggttcgaact

SEQ ID NO: 53172 - DNA, 18 bp, Artificial Sequence
  Synthetic: FXN O reverse 9:69046385-69046409; SaCas9
gccacgttggttcgaact

SEQ ID NO: 53173 - DNA, 25 bp, Artificial Sequence
  Synthetic: FXN O reverse 9:69046385-69046416; SaCas9
caaatctggttgaggccacgttggt

SEQ ID NO: 53174 - DNA, 24 bp, Artificial Sequence
  Synthetic: FXN O reverse 9:69046386-69046416; SaCas9
aaatctggttgaggccacgttggt

SEQ ID NO: 53175 - DNA, 23 bp, Artificial Sequence
  Synthetic: FXN O reverse 9:69046387-69046416; SaCas9
aatctggttgaggccacgttggt

SEQ ID NO: 53176 - DNA, 22 bp, Artificial Sequence
  Synthetic: FXN O reverse 9:69046388-69046416; SaCas9
atctggttgaggccacgttggt

SEQ ID NO: 53177 - DNA, 21 bp, Artificial Sequence
  Synthetic: FXN O reverse 9:69046389-69046416; SaCas9
tctggttgaggccacgttggt

SEQ ID NO: 53178 - DNA, 20 bp, Artificial Sequence
  Synthetic: FXN O reverse 9:69046390-69046416; SaCas9
ctggttgaggccacgttggt

SEQ ID NO: 53179 - DNA, 19 bp, Artificial Sequence
  Synthetic: FXN O reverse 9:69046391-69046416; SaCas9
tggttgaggccacgttggt

SEQ ID NO: 53180 - DNA, 18 bp, Artificial Sequence
  Synthetic: FXN O reverse 9:69046392-69046416; SaCas9
ggttgaggccacgttggt

SEQ ID NO: 53181 - DNA, 25 bp, Artificial Sequence
  Synthetic: FXN O forward 9:69046388-69046419; SaCas9
cgaaccaacgtggcctcaaccagat

SEQ ID NO: 53182 - DNA, 24 bp, Artificial Sequence
  Synthetic: FXN O forward 9:69046389-69046419; SaCas9
gaaccaacgtggcctcaaccagat

SEQ ID NO: 53183 - DNA, 23 bp, Artificial Sequence
  Synthetic: FXN O forward 9:69046390-69046419; SaCas9
aaccaacgtggcctcaaccagat

SEQ ID NO: 53184 - DNA, 22 bp, Artificial Sequence
  Synthetic: FXN O forward 9:69046391-69046419; SaCas9
accaacgtggcctcaaccagat

SEQ ID NO: 53185 - DNA, 21 bp, Artificial Sequence
  Synthetic: FXN O forward 9:69046392-69046419; SaCas9
ccaacgtggcctcaaccagat

SEQ ID NO: 53186 - DNA, 20 bp, Artificial Sequence
  Synthetic: FXN O forward 9:69046393-69046419; SaCas9
caacgtggcctcaaccagat

SEQ ID NO: 53187 - DNA, 19 bp, Artificial Sequence
  Synthetic: FXN O forward 9:69046394-69046419; SaCas9
aacgtggcctcaaccagat

SEQ ID NO: 53188 - DNA, 18 bp, Artificial Sequence
  Synthetic: FXN O forward 9:69046395-69046419; SaCas9
acgtggcctcaaccagat

SEQ ID NO: 53189 - DNA, 25 bp, Artificial Sequence
  Synthetic: FXN O forward 9:69046389-69046420; SaCas9
gaaccaacgtggcctcaaccagatt

SEQ ID NO: 53190 - DNA, 24 bp, Artificial Sequence
  Synthetic: FXN O forward 9:69046390-69046420; SaCas9
aaccaacgtggcctcaaccagatt

SEQ ID NO: 53191 - DNA, 23 bp, Artificial Sequence
  Synthetic: FXN O forward 9:69046391-69046420; SaCas9
accaacgtggcctcaaccagatt

SEQ ID NO: 53192 - DNA, 22 bp, Artificial Sequence
  Synthetic: FXN O forward 9:69046392-69046420; SaCas9
ccaacgtggcctcaaccagatt

SEQ ID NO: 53193 - DNA, 21 bp, Artificial Sequence
  Synthetic: FXN O forward 9:69046393-69046420; SaCas9
caacgtggcctcaaccagatt

SEQ ID NO: 53194 - DNA, 20 bp, Artificial Sequence
  Synthetic: FXN O forward 9:69046394-69046420; SaCas9
aacgtggcctcaaccagatt

SEQ ID NO: 53195 - DNA, 19 bp, Artificial Sequence
  Synthetic: FXN O forward 9:69046395-69046420; SaCas9
acgtggcctcaaccagatt

SEQ ID NO: 53196 - DNA, 18 bp, Artificial Sequence
  Synthetic: FXN O forward 9:69046396-69046420; SaCas9
cgtggcctcaaccagatt

SEQ ID NO: 53197 - DNA, 25 bp, Artificial Sequence
  Synthetic: FXN O reverse 9:69046401-69046432; SaCas9
ctgctttttgacattccaaatctgg

SEQ ID NO: 53198 - DNA, 24 bp, Artificial Sequence
  Synthetic: FXN O reverse 9:69046402-69046432; SaCas9
tgctttttgacattccaaatctgg

SEQ ID NO: 53199 - DNA, 23 bp, Artificial Sequence
  Synthetic: FXN O reverse 9:69046403-69046432; SaCas9
gctttttgacattccaaatctgg

SEQ ID NO: 53200 - DNA, 22 bp, Artificial Sequence
  Synthetic: FXN O reverse 9:69046404-69046432; SaCas9
ctttttgacattccaaatctgg

SEQ ID NO: 53201 - DNA, 21 bp, Artificial Sequence
  Synthetic: FXN O reverse 9:69046405-69046432; SaCas9
tttttgacattccaaatctgg

SEQ ID NO: 53202 - DNA, 20 bp, Artificial Sequence
  Synthetic: FXN O reverse 9:69046406-69046432; SaCas9
ttttgacattccaaatctgg

SEQ ID NO: 53203 - DNA, 19 bp, Artificial Sequence
  Synthetic: FXN O reverse 9:69046407-69046432; SaCas9
tttgacattccaaatctgg

SEQ ID NO: 53204 - DNA, 18 bp, Artificial Sequence
  Synthetic: FXN O reverse 9:69046408-69046432; SaCas9
ttgacattccaaatctgg

SEQ ID NO: 53205 - DNA, 25 bp, Artificial Sequence
  Synthetic: FXN O reverse 9:69035898-69035926; SpCas9
cgcatcgatgtcggtgcgcaggcca

SEQ ID NO: 53206 - DNA, 24 bp, Artificial Sequence
  Synthetic: FXN O reverse 9:69035899-69035926; SpCas9
gcatcgatgtcggtgcgcaggcca

SEQ ID NO: 53207 - DNA, 23 bp, Artificial Sequence
  Synthetic: FXN O reverse 9:69035900-69035926; SpCas9
catcgatgtcggtgcgcaggcca

SEQ ID NO: 53208 - DNA, 22 bp, Artificial Sequence
  Synthetic: FXN O reverse 9:69035901-69035926; SpCas9
atcgatgtcggtgcgcaggcca

SEQ ID NO: 53209 - DNA, 21 bp, Artificial Sequence
  Synthetic: FXN O reverse 9:69035902-69035926; SpCas9
tcgatgtcggtgcgcaggcca

SEQ ID NO: 53210 - DNA, 20 bp, Artificial Sequence
  Synthetic: FXN O reverse 9:69035903-69035926; SpCas9
cgatgtcggtgcgcaggcca

SEQ ID NO: 53211 - DNA, 19 bp, Artificial Sequence
  Synthetic: FXN O reverse 9:69035904-69035926; SpCas9
gatgtcggtgcgcaggcca

SEQ ID NO: 53212 - DNA, 18 bp, Artificial Sequence
  Synthetic: FXN O reverse 9:69035905-69035926; SpCas9
atgtcggtgcgcaggcca

SEQ ID NO: 53213 - DNA, 25 bp, Artificial Sequence
  Synthetic: FXN O reverse 9:69035904-69035932; SpCas9
gcaggtcgcatcgatgtcggtgcgc

SEQ ID NO: 53214 - DNA, 24 bp, Artificial Sequence
  Synthetic: FXN O reverse 9:69035905-69035932; SpCas9
caggtcgcatcgatgtcggtgcgc

SEQ ID NO: 53215 - DNA, 23 bp, Artificial Sequence
  Synthetic: FXN O reverse 9:69035906-69035932; SpCas9
aggtcgcatcgatgtcggtgcgc

SEQ ID NO: 53216 - DNA, 22 bp, Artificial Sequence
  Synthetic: FXN O reverse 9:69035907-69035932; SpCas9
ggtcgcatcgatgtcggtgcgc

SEQ ID NO: 53217 - DNA, 21 bp, Artificial Sequence
  Synthetic: FXN O reverse 9:69035908-69035932; SpCas9
gtcgcatcgatgtcggtgcgc

SEQ ID NO: 53218 - DNA, 20 bp, Artificial Sequence
  Synthetic: FXN O reverse 9:69035909-69035932; SpCas9
tcgcatcgatgtcggtgcgc

SEQ ID NO: 53219 - DNA, 19 bp, Artificial Sequence
  Synthetic: FXN O reverse 9:69035910-69035932; SpCas9
cgcatcgatgtcggtgcgc

SEQ ID NO: 53220 - DNA, 18 bp, Artificial Sequence
  Synthetic: FXN O reverse 9:69035911-69035932; SpCas9
gcatcgatgtcggtgcgc

SEQ ID NO: 53221 - DNA, 25 bp, Artificial Sequence
  Synthetic: FXN O reverse 9:69035905-69035933; SpCas9
tgcaggtcgcatcgatgtcggtgcg

SEQ ID NO: 53222 - DNA, 24 bp, Artificial Sequence
  Synthetic: FXN O reverse 9:69035906-69035933; SpCas9
gcaggtcgcatcgatgtcggtgcg

SEQ ID NO: 53223 - DNA, 23 bp, Artificial Sequence
  Synthetic: FXN O reverse 9:69035907-69035933; SpCas9
caggtcgcatcgatgtcggtgcg

SEQ ID NO: 53224 - DNA, 22 bp, Artificial Sequence
  Synthetic: FXN O reverse 9:69035908-69035933; SpCas9
aggtcgcatcgatgtcggtgcg

SEQ ID NO: 53225 - DNA, 21 bp, Artificial Sequence
  Synthetic: FXN O reverse 9:69035909-69035933; SpCas9
ggtcgcatcgatgtcggtgcg

SEQ ID NO: 53226 - DNA, 20 bp, Artificial Sequence
  Synthetic: FXN O reverse 9:69035910-69035933; SpCas9
gtcgcatcgatgtcggtgcg

SEQ ID NO: 53227 - DNA, 19 bp, Artificial Sequence
  Synthetic: FXN O reverse 9:69035911-69035933; SpCas9
tcgcatcgatgtcggtgcg

SEQ ID NO: 53228 - DNA, 18 bp, Artificial Sequence
  Synthetic: FXN O reverse 9:69035912-69035933; SpCas9
cgcatcgatgtcggtgcg

SEQ ID NO: 53229 - DNA, 25 bp, Artificial Sequence
  Synthetic: FXN O reverse 9:69035912-69035940; SpCas9
cggggcgtgcaggtcgcatcgatgt

SEQ ID NO: 53230 - DNA, 24 bp, Artificial Sequence
  Synthetic: FXN O reverse 9:69035913-69035940; SpCas9
ggggcgtgcaggtcgcatcgatgt

SEQ ID NO: 53231 - DNA, 23 bp, Artificial Sequence
  Synthetic: FXN O reverse 9:69035914-69035940; SpCas9
gggcgtgcaggtcgcatcgatgt

SEQ ID NO: 53232 - DNA, 22 bp, Artificial Sequence
  Synthetic: FXN O reverse 9:69035915-69035940; SpCas9
ggcgtgcaggtcgcatcgatgt

SEQ ID NO: 53233 - DNA, 21 bp, Artificial Sequence
  Synthetic: FXN O reverse 9:69035916-69035940; SpCas9
gcgtgcaggtcgcatcgatgt

SEQ ID NO: 53234 - DNA, 20 bp, Artificial Sequence
  Synthetic: FXN O reverse 9:69035917-69035940; SpCas9
cgtgcaggtcgcatcgatgt

SEQ ID NO: 53235 - DNA, 19 bp, Artificial Sequence
  Synthetic: FXN O reverse 9:69035918-69035940; SpCas9
gtgcaggtcgcatcgatgt

SEQ ID NO: 53236 - DNA, 18 bp, Artificial Sequence
  Synthetic: FXN O reverse 9:69035919-69035940; SpCas9
tgcaggtcgcatcgatgt

SEQ ID NO: 53237 - DNA, 25 bp, Artificial Sequence
  Synthetic: FXN O forward 9:69035920-69035948; SpCas9
gatgcgacctgcacgccccgccgcg

SEQ ID NO: 53238 - DNA, 24 bp, Artificial Sequence
  Synthetic: FXN O forward 9:69035921-69035948; SpCas9
atgcgacctgcacgccccgccgcg

SEQ ID NO: 53239 - DNA, 23 bp, Artificial Sequence
  Synthetic: FXN O forward 9:69035922-69035948; SpCas9
tgcgacctgcacgccccgccgcg

SEQ ID NO: 53240 - DNA, 22 bp, Artificial Sequence
  Synthetic: FXN O forward 9:69035923-69035948; SpCas9
gcgacctgcacgccccgccgcg

SEQ ID NO: 53241 - DNA, 21 bp, Artificial Sequence
  Synthetic: FXN O forward 9:69035924-69035948; SpCas9
cgacctgcacgccccgccgcg

SEQ ID NO: 53242 - DNA, 20 bp, Artificial Sequence
  Synthetic: FXN O forward 9:69035925-69035948; SpCas9
gacctgcacgccccgccgcg

SEQ ID NO: 53243 - DNA, 19 bp, Artificial Sequence
  Synthetic: FXN O forward 9:69035926-69035948; SpCas9
acctgcacgccccgccgcg

SEQ ID NO: 53244 - DNA, 18 bp, Artificial Sequence
  Synthetic: FXN O forward 9:69035927-69035948; SpCas9
cctgcacgccccgccgcg

SEQ ID NO: 53245 - DNA, 25 bp, Artificial Sequence
  Synthetic: FXN O forward 9:69035924-69035952; SpCas9
cgacctgcacgccccgccgcgcagt

SEQ ID NO: 53246 - DNA, 24 bp, Artificial Sequence
  Synthetic: FXN O forward 9:69035925-69035952; SpCas9
gacctgcacgccccgccgcgcagt

SEQ ID NO: 53247 - DNA, 23 bp, Artificial Sequence
  Synthetic: FXN O forward 9:69035926-69035952; SpCas9
acctgcacgccccgccgcgcagt

SEQ ID NO: 53248 - DNA, 22 bp, Artificial Sequence
  Synthetic: FXN O forward 9:69035927-69035952; SpCas9
cctgcacgccccgccgcgcagt

SEQ ID NO: 53249 - DNA, 21 bp, Artificial Sequence
  Synthetic: FXN O forward 9:69035928-69035952; SpCas9
ctgcacgccccgccgcgcagt

SEQ ID NO: 53250 - DNA, 20 bp, Artificial Sequence
  Synthetic: FXN O forward 9:69035929-69035952; SpCas9
tgcacgccccgccgcgcagt

SEQ ID NO: 53251 - DNA, 19 bp, Artificial Sequence
  Synthetic: FXN O forward 9:69035930-69035952; SpCas9
gcacgccccgccgcgcagt

SEQ ID NO: 53252 - DNA, 18 bp, Artificial Sequence
  Synthetic: FXN O forward 9:69035931-69035952; SpCas9
cacgccccgccgcgcagt

SEQ ID NO: 53253 - DNA, 25 bp, Artificial Sequence
  Synthetic: FXN O reverse 9:69035927-69035955; SpCas9
atacttactgcgcggcggggcgtgc

SEQ ID NO: 53254 - DNA, 24 bp, Artificial Sequence
  Synthetic: FXN O reverse 9:69035928-69035955; SpCas9
tacttactgcgcggcggggcgtgc

SEQ ID NO: 53255 - DNA, 23 bp, Artificial Sequence
  Synthetic: FXN O reverse 9:69035929-69035955; SpCas9
acttactgcgcggcggggcgtgc

SEQ ID NO: 53256 - DNA, 22 bp, Artificial Sequence
  Synthetic: FXN O reverse 9:69035930-69035955; SpCas9
cttactgcgcggcggggcgtgc

SEQ ID NO: 53257 - DNA, 21 bp, Artificial Sequence
  Synthetic: FXN O reverse 9:69035931-69035955; SpCas9
ttactgcgcggcggggcgtgc

SEQ ID NO: 53258 - DNA, 20 bp, Artificial Sequence
  Synthetic: FXN O reverse 9:69035932-69035955; SpCas9
tactgcgcggcggggcgtgc

SEQ ID NO: 53259 - DNA, 19 bp, Artificial Sequence
  Synthetic: FXN O reverse 9:69035933-69035955; SpCas9
actgcgcggcggggcgtgc

SEQ ID NO: 53260 - DNA, 18 bp, Artificial Sequence
  Synthetic: FXN O reverse 9:69035934-69035955; SpCas9
ctgcgcggcggggcgtgc

SEQ ID NO: 53261 - DNA, 25 bp, Artificial Sequence
  Synthetic: FXN O reverse 9:69035928-69035956; SpCas9
gatacttactgcgcggcggggcgtg

SEQ ID NO: 53262 - DNA, 24 bp, Artificial Sequence
  Synthetic: FXN O reverse 9:69035929-69035956; SpCas9
atacttactgcgcggcggggcgtg

SEQ ID NO: 53263 - DNA, 23 bp, Artificial Sequence
  Synthetic: FXN O reverse 9:69035930-69035956; SpCas9
tacttactgcgcggcggggcgtg

SEQ ID NO: 53264 - DNA, 22 bp, Artificial Sequence
  Synthetic: FXN O reverse 9:69035931-69035956; SpCas9
acttactgcgcggcggggcgtg

SEQ ID NO: 53265 - DNA, 21 bp, Artificial Sequence
  Synthetic: FXN O reverse 9:69035932-69035956; SpCas9
cttactgcgcggcggggcgtg

SEQ ID NO: 53266 - DNA, 20 bp, Artificial Sequence
  Synthetic: FXN O reverse 9:69035933-69035956; SpCas9
ttactgcgcggcggggcgtg

SEQ ID NO: 53267 - DNA, 19 bp, Artificial Sequence
  Synthetic: FXN O reverse 9:69035934-69035956; SpCas9
tactgcgcggcggggcgtg

SEQ ID NO: 53268 - DNA, 18 bp, Artificial Sequence
  Synthetic: FXN O reverse 9:69035935-69035956; SpCas9
actgcgcggcggggcgtg

SEQ ID NO: 53269 - DNA, 25 bp, Artificial Sequence
  Synthetic: FXN O reverse 9:69035935-69035963; SpCas9
cggcgcggatacttactgcgcggcg

SEQ ID NO: 53270 - DNA, 24 bp, Artificial Sequence
  Synthetic: FXN O reverse 9:69035936-69035963; SpCas9
ggcgcggatacttactgcgcggcg

SEQ ID NO: 53271 - DNA, 23 bp, Artificial Sequence
  Synthetic: FXN O reverse 9:69035937-69035963; SpCas9
gcgcggatacttactgcgcggcg

SEQ ID NO: 53272 - DNA, 22 bp, Artificial Sequence
  Synthetic: FXN O reverse 9:69035938-69035963; SpCas9
cgcggatacttactgcgcggcg

SEQ ID NO: 53273 - DNA, 21 bp, Artificial Sequence
  Synthetic: FXN O reverse 9:69035939-69035963; SpCas9
gcggatacttactgcgcggcg

SEQ ID NO: 53274 - DNA, 20 bp, Artificial Sequence
  Synthetic: FXN O reverse 9:69035940-69035963; SpCas9
cggatacttactgcgcggcg

SEQ ID NO: 53275 - DNA, 19 bp, Artificial Sequence
  Synthetic: FXN O reverse 9:69035941-69035963; SpCas9
ggatacttactgcgcggcg

SEQ ID NO: 53276 - DNA, 18 bp, Artificial Sequence
  Synthetic: FXN O reverse 9:69035942-69035963; SpCas9
gatacttactgcgcggcg

SEQ ID NO: 53277 - DNA, 25 bp, Artificial Sequence
  Synthetic: FXN O reverse 9:69035936-69035964; SpCas9
ccggcgcggatacttactgcgcggc

SEQ ID NO: 53278 - DNA, 24 bp, Artificial Sequence
  Synthetic: FXN O reverse 9:69035937-69035964; SpCas9
cggcgcggatacttactgcgcggc

SEQ ID NO: 53279 - DNA, 23 bp, Artificial Sequence
  Synthetic: FXN O reverse 9:69035938-69035964; SpCas9
ggcgcggatacttactgcgcggc

SEQ ID NO: 53280 - DNA, 22 bp, Artificial Sequence
  Synthetic: FXN O reverse 9:69035939-69035964; SpCas9
gcgcggatacttactgcgcggc

SEQ ID NO: 53281 - DNA, 21 bp, Artificial Sequence
  Synthetic: FXN O reverse 9:69035940-69035964; SpCas9
cgcggatacttactgcgcggc

SEQ ID NO: 53282 - DNA, 20 bp, Artificial Sequence
  Synthetic: FXN O reverse 9:69035941-69035964; SpCas9
gcggatacttactgcgcggc

SEQ ID NO: 53283 - DNA, 19 bp, Artificial Sequence
  Synthetic: FXN O reverse 9:69035942-69035964; SpCas9
cggatacttactgcgcggc

SEQ ID NO: 53284 - DNA, 18 bp, Artificial Sequence
  Synthetic: FXN O reverse 9:69035943-69035964; SpCas9
ggatacttactgcgcggc

SEQ ID NO: 53285 - DNA, 25 bp, Artificial Sequence
  Synthetic: FXN O reverse 9:69035937-69035965; SpCas9
cccggcgcggatacttactgcgcgg

SEQ ID NO: 53286 - DNA, 24 bp, Artificial Sequence
  Synthetic: FXN O reverse 9:69035938-69035965; SpCas9
ccggcgcggatacttactgcgcgg

SEQ ID NO: 53287 - DNA, 23 bp, Artificial Sequence
  Synthetic: FXN O reverse 9:69035939-69035965; SpCas9
cggcgcggatacttactgcgcgg

SEQ ID NO: 53288 - DNA, 22 bp, Artificial Sequence
  Synthetic: FXN O reverse 9:69035940-69035965; SpCas9
ggcgcggatacttactgcgcgg

SEQ ID NO: 53289 - DNA, 21 bp, Artificial Sequence
  Synthetic: FXN O reverse 9:69035941-69035965; SpCas9
gcgcggatacttactgcgcgg

SEQ ID NO: 53290 - DNA, 20 bp, Artificial Sequence
  Synthetic: FXN O reverse 9:69035942-69035965; SpCas9
cgcggatacttactgcgcgg

SEQ ID NO: 53291 - DNA, 19 bp, Artificial Sequence
  Synthetic: FXN O reverse 9:69035943-69035965; SpCas9
gcggatacttactgcgcgg

SEQ ID NO: 53292 - DNA, 18 bp, Artificial Sequence
  Synthetic: FXN O reverse 9:69035944-69035965; SpCas9
cggatacttactgcgcgg

SEQ ID NO: 53293 - DNA, 25 bp, Artificial Sequence
  Synthetic: FXN O reverse 9:69035940-69035968; SpCas9
gttcccggcgcggatacttactgcg

SEQ ID NO: 53294 - DNA, 24 bp, Artificial Sequence
  Synthetic: FXN O reverse 9:69035941-69035968; SpCas9
ttcccggcgcggatacttactgcg

SEQ ID NO: 53295 - DNA, 23 bp, Artificial Sequence
  Synthetic: FXN O reverse 9:69035942-69035968; SpCas9
tcccggcgcggatacttactgcg

SEQ ID NO: 53296 - DNA, 22 bp, Artificial Sequence
  Synthetic: FXN O reverse 9:69035943-69035968; SpCas9
cccggcgcggatacttactgcg

SEQ ID NO: 53297 - DNA, 21 bp, Artificial Sequence
  Synthetic: FXN O reverse 9:69035944-69035968; SpCas9
ccggcgcggatacttactgcg

SEQ ID NO: 53298 - DNA, 20 bp, Artificial Sequence
  Synthetic: FXN O reverse 9:69035945-69035968; SpCas9
cggcgcggatacttactgcg

SEQ ID NO: 53299 - DNA, 19 bp, Artificial Sequence
  Synthetic: FXN O reverse 9:69035946-69035968; SpCas9
ggcgcggatacttactgcg

SEQ ID NO: 53300 - DNA, 18 bp, Artificial Sequence
  Synthetic: FXN O reverse 9:69035947-69035968; SpCas9
gcgcggatacttactgcg

SEQ ID NO: 53301 - DNA, 25 bp, Artificial Sequence
  Synthetic: FXN O forward 9:69046373-69046401; SpCas9
ttggctttcagagttcgaaccaacg

SEQ ID NO: 53302 - DNA, 24 bp, Artificial Sequence
  Synthetic: FXN O forward 9:69046374-69046401; SpCas9
tggctttcagagttcgaaccaacg

SEQ ID NO: 53303 - DNA, 23 bp, Artificial Sequence
  Synthetic: FXN O forward 9:69046375-69046401; SpCas9
ggctttcagagttcgaaccaacg

SEQ ID NO: 53304 - DNA, 22 bp, Artificial Sequence
  Synthetic: FXN O forward 9:69046376-69046401; SpCas9
gctttcagagttcgaaccaacg

SEQ ID NO: 53305 - DNA, 21 bp, Artificial Sequence
  Synthetic: FXN O forward 9:69046377-69046401; SpCas9
ctttcagagttcgaaccaacg

SEQ ID NO: 53306 - DNA, 20 bp, Artificial Sequence
  Synthetic: FXN O forward 9:69046378-69046401; SpCas9
tttcagagttcgaaccaacg

SEQ ID NO: 53307 - DNA, 19 bp, Artificial Sequence
  Synthetic: FXN O forward 9:69046379-69046401; SpCas9
ttcagagttcgaaccaacg

SEQ ID NO: 53308 - DNA, 18 bp, Artificial Sequence
  Synthetic: FXN O forward 9:69046380-69046401; SpCas9
tcagagttcgaaccaacg

SEQ ID NO: 53309 - DNA, 25 bp, Artificial Sequence
  Synthetic: FXN O forward 9:69046383-69046411; SpCas9
gagttcgaaccaacgtggcctcaac

SEQ ID NO: 53310 - DNA, 24 bp, Artificial Sequence
  Synthetic: FXN O forward 9:69046384-69046411; SpCas9
agttcgaaccaacgtggcctcaac

SEQ ID NO: 53311 - DNA, 23 bp, Artificial Sequence
  Synthetic: FXN O forward 9:69046385-69046411; SpCas9
gttcgaaccaacgtggcctcaac

SEQ ID NO: 53312 - DNA, 22 bp, Artificial Sequence
  Synthetic: FXN O forward 9:69046386-69046411; SpCas9
ttcgaaccaacgtggcctcaac

SEQ ID NO: 53313 - DNA, 21 bp, Artificial Sequence
  Synthetic: FXN O forward 9:69046387-69046411; SpCas9
tcgaaccaacgtggcctcaac

SEQ ID NO: 53314 - DNA, 20 bp, Artificial Sequence
  Synthetic: FXN O forward 9:69046388-69046411; SpCas9
cgaaccaacgtggcctcaac

SEQ ID NO: 53315 - DNA, 19 bp, Artificial Sequence
  Synthetic: FXN O forward 9:69046389-69046411; SpCas9
gaaccaacgtggcctcaac

SEQ ID NO: 53316 - DNA, 18 bp, Artificial Sequence
  Synthetic: FXN O forward 9:69046390-69046411; SpCas9
aaccaacgtggcctcaac

SEQ ID NO: 53317 - DNA, 25 bp, Artificial Sequence
  Synthetic: FXN O forward 9:69046389-69046417; SpCas9
gaaccaacgtggcctcaaccagatt

SEQ ID NO: 53318 - DNA, 24 bp, Artificial Sequence
  Synthetic: FXN O forward 9:69046390-69046417; SpCas9
aaccaacgtggcctcaaccagatt

SEQ ID NO: 53319 - DNA, 23 bp, Artificial Sequence
  Synthetic: FXN O forward 9:69046391-69046417; SpCas9
accaacgtggcctcaaccagatt

SEQ ID NO: 53320 - DNA, 22 bp, Artificial Sequence
  Synthetic: FXN O forward 9:69046392-69046417; SpCas9
ccaacgtggcctcaaccagatt

SEQ ID NO: 53321 - DNA, 21 bp, Artificial Sequence
  Synthetic: FXN O forward 9:69046393-69046417; SpCas9
caacgtggcctcaaccagatt

SEQ ID NO: 53322 - DNA, 20 bp, Artificial Sequence
  Synthetic: FXN O forward 9:69046394-69046417; SpCas9
aacgtggcctcaaccagatt

SEQ ID NO: 53323 - DNA, 19 bp, Artificial Sequence
  Synthetic: FXN O forward 9:69046395-69046417; SpCas9
acgtggcctcaaccagatt

SEQ ID NO: 53324 - DNA, 18 bp, Artificial Sequence
  Synthetic: FXN O forward 9:69046396-69046417; SpCas9
cgtggcctcaaccagatt

SEQ ID NO: 53325 - DNA, 25 bp, Artificial Sequence
  Synthetic: FXN O reverse 9:69046392-69046420; SpCas9
attccaaatctggttgaggccacgt

SEQ ID NO: 53326 - DNA, 24 bp, Artificial Sequence
  Synthetic: FXN O reverse 9:69046393-69046420; SpCas9
ttccaaatctggttgaggccacgt

SEQ ID NO: 53327 - DNA, 23 bp, Artificial Sequence
  Synthetic: FXN O reverse 9:69046394-69046420; SpCas9
tccaaatctggttgaggccacgt

SEQ ID NO: 53328 - DNA, 22 bp, Artificial Sequence
  Synthetic: FXN O reverse 9:69046395-69046420; SpCas9
ccaaatctggttgaggccacgt

SEQ ID NO: 53329 - DNA, 21 bp, Artificial Sequence
  Synthetic: FXN O reverse 9:69046396-69046420; SpCas9
caaatctggttgaggccacgt

SEQ ID NO: 53330 - DNA, 20 bp, Artificial Sequence
  Synthetic: FXN O reverse 9:69046397-69046420; SpCas9
aaatctggttgaggccacgt

SEQ ID NO: 53331 - DNA, 19 bp, Artificial Sequence
  Synthetic: FXN O reverse 9:69046398-69046420; SpCas9
aatctggttgaggccacgt

SEQ ID NO: 53332 - DNA, 18 bp, Artificial Sequence
  Synthetic: FXN O reverse 9:69046399-69046420; SpCas9
atctggttgaggccacgt

SEQ ID NO: 53333 - DNA, 25 bp, Artificial Sequence
  Synthetic: FXN O forward 9:69046401-69046429; SpCas9
cctcaaccagatttggaatgtcaaa

SEQ ID NO: 53334 - DNA, 24 bp, Artificial Sequence
  Synthetic: FXN O forward 9:69046402-69046429; SpCas9
ctcaaccagatttggaatgtcaaa

SEQ ID NO: 53335 - DNA, 23 bp, Artificial Sequence
  Synthetic: FXN O forward 9:69046403-69046429; SpCas9
tcaaccagatttggaatgtcaaa

SEQ ID NO: 53336 - DNA, 22 bp, Artificial Sequence
  Synthetic: FXN O forward 9:69046404-69046429; SpCas9
caaccagatttggaatgtcaaa

SEQ ID NO: 53337 - DNA, 21 bp, Artificial Sequence
  Synthetic: FXN O forward 9:69046405-69046429; SpCas9
aaccagatttggaatgtcaaa

SEQ ID NO: 53338 - DNA, 20 bp, Artificial Sequence
  Synthetic: FXN O forward 9:69046406-69046429; SpCas9
accagatttggaatgtcaaa

SEQ ID NO: 53339 - DNA, 19 bp, Artificial Sequence
  Synthetic: FXN O forward 9:69046407-69046429; SpCas9
ccagatttggaatgtcaaa

SEQ ID NO: 53340 - DNA, 18 bp, Artificial Sequence
  Synthetic: FXN O forward 9:69046408-69046429; SpCas9
cagatttggaatgtcaaa

SEQ ID NO: 53341 - DNA, 25 bp, Artificial Sequence
  Synthetic: FXN O reverse 9:69046401-69046429; SpCas9
ctttttgacattccaaatctggttg

SEQ ID NO: 53342 - DNA, 24 bp, Artificial Sequence
  Synthetic: FXN O reverse 9:69046402-69046429; SpCas9
tttttgacattccaaatctggttg

SEQ ID NO: 53343 - DNA, 23 bp, Artificial Sequence
  Synthetic: FXN O reverse 9:69046403-69046429; SpCas9
ttttgacattccaaatctggttg

SEQ ID NO: 53344 - DNA, 22 bp, Artificial Sequence
  Synthetic: FXN O reverse 9:69046404-69046429; SpCas9
tttgacattccaaatctggttg

SEQ ID NO: 53345 - DNA, 21 bp, Artificial Sequence
  Synthetic: FXN O reverse 9:69046405-69046429; SpCas9
ttgacattccaaatctggttg

SEQ ID NO: 53346 - DNA, 20 bp, Artificial Sequence
  Synthetic: FXN O reverse 9:69046406-69046429; SpCas9
tgacattccaaatctggttg

SEQ ID NO: 53347 - DNA, 19 bp, Artificial Sequence
  Synthetic: FXN O reverse 9:69046407-69046429; SpCas9
gacattccaaatctggttg

SEQ ID NO: 53348 - DNA, 18 bp, Artificial Sequence
  Synthetic: FXN O reverse 9:69046408-69046429; SpCas9
acattccaaatctggttg

SEQ ID NO: 53349 - DNA, 25 bp, Artificial Sequence
  Synthetic: FXN O reverse 9:69046402-69046430; SpCas9
gctttttgacattccaaatctggtt

SEQ ID NO: 53350 - DNA, 24 bp, Artificial Sequence
  Synthetic: FXN O reverse 9:69046403-69046430; SpCas9
ctttttgacattccaaatctggtt

SEQ ID NO: 53351 - DNA, 23 bp, Artificial Sequence
  Synthetic: FXN O reverse 9:69046404-69046430; SpCas9
tttttgacattccaaatctggtt

SEQ ID NO: 53352 - DNA, 22 bp, Artificial Sequence
  Synthetic: FXN O reverse 9:69046405-69046430; SpCas9
ttttgacattccaaatctggtt

SEQ ID NO: 53353 - DNA, 21 bp, Artificial Sequence
  Synthetic: FXN O reverse 9:69046406-69046430; SpCas9
tttgacattccaaatctggtt

SEQ ID NO: 53354 - DNA, 20 bp, Artificial Sequence
  Synthetic: FXN O reverse 9:69046407-69046430; SpCas9
ttgacattccaaatctggtt

SEQ ID NO: 53355 - DNA, 19 bp, Artificial Sequence
  Synthetic: FXN O reverse 9:69046408-69046430; SpCas9
tgacattccaaatctggtt

SEQ ID NO: 53356 - DNA, 18 bp, Artificial Sequence
  Synthetic: FXN O reverse 9:69046409-69046430; SpCas9
gacattccaaatctggtt

SEQ ID NO: 53357 - DNA, 25 bp, Artificial Sequence
  Synthetic: FXN O forward 9:69046404-69046432; SpCas9
caaccagatttggaatgtcaaaaag

SEQ ID NO: 53358 - DNA, 24 bp, Artificial Sequence
  Synthetic: FXN O forward 9:69046405-69046432; SpCas9
aaccagatttggaatgtcaaaaag

SEQ ID NO: 53359 - DNA, 23 bp, Artificial Sequence
  Synthetic: FXN O forward 9:69046406-69046432; SpCas9
accagatttggaatgtcaaaaag

SEQ ID NO: 53360 - DNA, 22 bp, Artificial Sequence
  Synthetic: FXN O forward 9:69046407-69046432; SpCas9
ccagatttggaatgtcaaaaag

SEQ ID NO: 53361 - DNA, 21 bp, Artificial Sequence
  Synthetic: FXN O forward 9:69046408-69046432; SpCas9
cagatttggaatgtcaaaaag

SEQ ID NO: 53362 - DNA, 20 bp, Artificial Sequence
  Synthetic: FXN O forward 9:69046409-69046432; SpCas9
agatttggaatgtcaaaaag

SEQ ID NO: 53363 - DNA, 19 bp, Artificial Sequence
  Synthetic: FXN O forward 9:69046410-69046432; SpCas9
gatttggaatgtcaaaaag

SEQ ID NO: 53364 - DNA, 18 bp, Artificial Sequence
  Synthetic: FXN O forward 9:69046411-69046432; SpCas9
atttggaatgtcaaaaag

SEQ ID NO: 53365 - DNA, 25 bp, Artificial Sequence
  Synthetic: FXN O forward 9:69046406-69046434; SpCas9
accagatttggaatgtcaaaaagca

SEQ ID NO: 53366 - DNA, 24 bp, Artificial Sequence
  Synthetic: FXN O forward 9:69046407-69046434; SpCas9
ccagatttggaatgtcaaaaagca

SEQ ID NO: 53367 - DNA, 23 bp, Artificial Sequence
  Synthetic: FXN O forward 9:69046408-69046434; SpCas9
cagatttggaatgtcaaaaagca

SEQ ID NO: 53368 - DNA, 22 bp, Artificial Sequence
  Synthetic: FXN O forward 9:69046409-69046434; SpCas9
agatttggaatgtcaaaaagca

SEQ ID NO: 53369 - DNA, 21 bp, Artificial Sequence
  Synthetic: FXN O forward 9:69046410-69046434; SpCas9
gatttggaatgtcaaaaagca

SEQ ID NO: 53370 - DNA, 20 bp, Artificial Sequence
  Synthetic: FXN O forward 9:69046411-69046434; SpCas9
atttggaatgtcaaaaagca

SEQ ID NO: 53371 - DNA, 19 bp, Artificial Sequence
  Synthetic: FXN O forward 9:69046412-69046434; SpCas9
tttggaatgtcaaaaagca

SEQ ID NO: 53372 - DNA, 18 bp, Artificial Sequence
  Synthetic: FXN O forward 9:69046413-69046434; SpCas9
ttggaatgtcaaaaagca

SEQ ID NO: 53373 - DNA, 19 bp, Artificial Sequence
  Synthetic: GDG_AAVS1_1
atcctgtccctagtggccc

SEQ ID NO: 53374 - DNA, 20 bp, Artificial Sequence
  Synthetic: Pac Bio primer 1
cgctaggaagcagccaatga

SEQ ID NO: 53375 - DNA, 20 bp, Artificial Sequence
  Synthetic: Pac Bio primer 2
tagctcctcccagaccttcg

SEQ ID NO: 53376 - DNA, 20 bp, Artificial Sequence
  Synthetic: Forward primer /5Phos/GGGT(16NT_index)
cgctaggaagcagccaatga

SEQ ID NO: 53377 - DNA, 20 bp, Artificial Sequence
  Synthetic: Reverse primer /5Phos/CAGT(16NT_index)
tagctcctcccagaccttcg

SEQ ID NO: 53378 - DNA, 40 bp, Artificial Sequence
  Synthetic: bc_1001_FWD_PacB.PCR
  misc_feature: 5' phos
gggtcacatatcagagtgcgcgctaggaagcagccaatga

SEQ ID NO: 53379 - DNA, 40 bp, Artificial Sequence
  Synthetic: bc_1002_FWD_PacB.PCR
  misc_feature: 5' phos
gggtacacacagactgtgagcgctaggaagcagccaatga

SEQ ID NO: 53380 - DNA, 40 bp, Artificial Sequence
  Synthetic: bc_1003_FWD_PacB.PCR
  misc_feature: 5' phos
gggtacacatctcgtgagagcgctaggaagcagccaatga

SEQ ID NO: 53381 - DNA, 40 bp, Artificial Sequence
  Synthetic: bc_1004_FWD_PacB.PCR
  misc_feature: 5' phos
gggtcacgcacacacgcgcgcgctaggaagcagccaatga

SEQ ID NO: 53382 - DNA, 40 bp, Artificial Sequence
  Synthetic: bc_1005_FWD_PacB.PCR
  misc_feature: 5' phos
gggtcactcgactctcgcgtcgctaggaagcagccaatga

SEQ ID NO: 53383 - DNA, 40 bp, Artificial Sequence
  Synthetic: bc_1006_FWD_PacB.PCR
  misc_feature: 5' phos
gggtcatatatatcagctgtcgctaggaagcagccaatga

SEQ ID NO: 53384 - DNA, 40 bp, Artificial Sequence
  Synthetic: bc_1007_FWD_PacB.PCR
  misc_feature: 5' phos
gggttctgtatctctatgtgcgctaggaagcagccaatga

SEQ ID NO: 53385 - DNA, 40 bp, Artificial Sequence
  Synthetic: bc_1008_FWD_PacB.PCR
  misc_feature: 5' phos
gggtacagtcgagcgctgcgcgctaggaagcagccaatga

SEQ ID NO: 53386 - DNA, 40 bp, Artificial Sequence
  Synthetic: bc_1009_FWD_PacB.PCR
  misc_feature: 5' phos
gggtacacacgcgagacagacgctaggaagcagccaatga

SEQ ID NO: 53387 - DNA, 40 bp, Artificial Sequence
  Synthetic: bc_1010_FWD_PacB.PCR
  misc_feature: 5' phos
gggtacgcgctatctcagagcgctaggaagcagccaatga

SEQ ID NO: 53388 - DNA, 40 bp, Artificial Sequence
  Synthetic: bc_1011_FWD_PacB.PCR
  misc_feature: 5' phos
gggtctatacgtatatctatcgctaggaagcagccaatga

SEQ ID NO: 53389 - DNA, 40 bp, Artificial Sequence
  Synthetic: bc_1012_FWD_PacB.PCR
  misc_feature: 5' phos
gggtacactagatcgcgtgtcgctaggaagcagccaatga

SEQ ID NO: 53390 - DNA, 40 bp, Artificial Sequence
  Synthetic: bc_1025_REV_PacB.PCR
  misc_feature: 5' phos
cagtgcgcgagcgtgtcgcgtagctcctcccagaccttcg

SEQ ID NO: 53391 - DNA, 40 bp, Artificial Sequence
  Synthetic: bc_1026_REV_PacB.PCR
cagttgtgcgtgtctctgtgtagctcctcccagaccttcg

SEQ ID NO: 53392 - DNA, 40 bp, Artificial Sequence
  Synthetic: bc_1027_REV_PacB.PCR
  misc_feature: 5' phos
cagttgtgagagagtgtgagtagctcctcccagaccttcg

SEQ ID NO: 53393 - DNA, 40 bp, Artificial Sequence
  Synthetic: bc_1028_REV_PacB.PCR
  misc_feature: 5' phos
cagtgagagtcagagcagagtagctcctcccagaccttcg

SEQ ID NO: 53394 - DNA, 40 bp, Artificial Sequence
  Synthetic: bc_1029_REV_PacB.PCR
  misc_feature: 5' phos
cagttctatagacatatatatagctcctcccagaccttcg

SEQ ID NO: 53395 - DNA, 40 bp, Artificial Sequence
  Synthetic: bc_1030_REV_PacB.PCR
  misc_feature: 5' phos
cagtgagcgcgatagagagatagctcctcccagaccttcg

SEQ ID NO: 53396 - DNA, 40 bp, Artificial Sequence
  Synthetic: bc_1031_REV_PacB.PCR
  misc_feature: 5' phos
cagtcacacactcagacatctagctcctcccagaccttcg

SEQ ID NO: 53397 - DNA, 40 bp, Artificial Sequence
  Synthetic: bc_1032_REV_PacB.PCR
  misc_feature: 5' phos
cagtcactatctctagtctctagctcctcccagaccttcg

SEQ ID NO: 53398 - DNA, 40 bp, Artificial Sequence
  Synthetic: bc_1033_REV_PacB.PCR
  misc_feature: 5' phos
cagtagagactgcgacgagatagctcctcccagaccttcg

SEQ ID NO: 53399 - DNA, 40 bp, Artificial Sequence
  Synthetic: bc_1034_REV_PacB.PCR
  misc_feature: 5' phos
cagtatatctatatacacattagctcctcccagaccttcg

SEQ ID NO: 53400 - DNA, 40 bp, Artificial Sequence
  Synthetic: bc_1035_REV_PacB.PCR
  misc_feature: 5' phos
cagtcagagagtgcgcgcgctagctcctcccagaccttcg

SEQ ID NO: 53401 - DNA, 40 bp, Artificial Sequence
  Synthetic: bc_1036_REV_PacB.PCR
  misc_feature: 5' phos
cagtgtgtgcgacgtgtctctagctcctcccagaccttcg

SEQ ID NO: 53402 - DNA, 20 bp, Artificial Sequence
  Synthetic: UTRF1
ggggatcacagaccatttct

SEQ ID NO: 53403 - DNA, 19 bp, Artificial Sequence
  Synthetic: UTRR14
tggaggatggaacacggac

SEQ ID NO: 53404 - DNA, 24 bp, Artificial Sequence
  Synthetic: UTRP2-FAM
ttctttcggccaggctgaggccct

SEQ ID NO: 53405 - DNA, 20 bp, Artificial Sequence
  Synthetic: DMPKF8
ggatatgtgaccatgctacc

SEQ ID NO: 53406 - DNA, 20 bp, Artificial Sequence
  Synthetic: DMPKR7
gggttgtatccagtacctct

SEQ ID NO: 53407 - DNA, 25 bp, Artificial Sequence
  Synthetic: DMPKP6-HEX
tgtcctgttccttcccccagcccca

SEQ ID NO: 53408 - RNA, 20 nt, Artificial Sequence
  Synthetic: CDC42BPB gRNA
gagccgcaccuuggccgaca

SEQ ID NO: 53409 - RNA, 20 nt, Artificial Sequence
  Synthetic: RELA gRNA
gaucuccacauaggggccag

SEQ ID NO: 53410 - DNA, 66 bp, Artificial Sequence
  Synthetic: Fw oligo for dual Cas12a sgRNA array
agataccatgttggccaggttagtctaatttctactcttgtagatccagcatctctggaaaaatag

SEQ ID NO: 53411 - DNA, 7443 bp, Artificial Sequence
  Synthetic: AAV1: hSyn-Cas12a
cctgcaggcagctgcgcgctcgctcgctcactgaggccgcccgggcaaagcccgggcgtcgggcgacctttggtcgcccggcctcagtgagcgagcgagcgcgcagagagggagtggccaactccatcactaggggttcctgcggcctctagactgcagagggccctgcgtatgagtgcaagtgggttttaggaccaggatgaggcggggtgggggtgcctacctgacgaccgaccccgacccactggacaagcacccaacccccattccccaaattgcgcatcccctatcagagagggggaggggaaacaggatgcggcgaggcgcgtgcgcactgccagcttcagcaccgcggacagtgccttcgcccccgcctggcggcgcgcgccaccgccgcctcagcactgaaggcgcgctgacgtcactcgccggtcccccgcaaactccccttcccggccaccttggtcgcgtccgcgccgccgccggcccagccggaccgcaccacgcgaggcgcgagataggggggcacgggcgcgaccatctgcgctgcggcgccggcgactcagcgctgcctcagtctgcggtgggcagcggaggagtcgtgtcgtgcctgagagcgcagtcgagaaggtaccggatccccgggtaccggtgccaccatgtacccatacgatgttccagattacgcttcgccgaagaaaaagcgcaaggtcgaagcgtccacacagttcgagggctttaccaacctgtatcaggtgagcaagacactgcggtttgagctgatcccacagggcaagaccctgaagcacatccaggagcagggcttcatcgaggaggacaaggcccgcaatgatcactacaaggagctgaagcccatcatcgatcggatctacaagacctatgccgaccagtgcctgcagctggtgcagctggattgggagaacctgagcgccgccatcgactcctatagaaaggagaaaaccgaggagacaaggaacgccctgatcgaggagcaggccacatatcgcaatgccatccacgactacttcatcggccggacagacaacctgaccgatgccatcaataagagacacgccgagatctacaagggcctgttcaaggccgagctgtttaatggcaaggtgctgaagcagctgggcaccgtgaccacaaccgagcacgagaacgccctgctgcggagcttcgacaagtttacaacctacttctccggcttttatgagaacaggaagaacgtgttcagcgccgaggatatcagcacagccatcccacaccgcatcgtgcaggacaacttccccaagtttaaggagaattgtcacatcttcacacgcctgatcaccgccgtgcccagcctgcgggagcactttgagaacgtgaagaaggccatcggcatcttcgtgagcacctccatcgaggaggtgttttccttccctttttataaccagctgctgacacagacccagatcgacctgtataaccagctgctgggaggaatctctcgggaggcaggcaccgagaagatcaagggcctgaacgaggtgctgaatctggccatccagaagaatgatgagacagcccacatcatcgcctccctgccacacagattcatccccctgtttaagcagatcctgtccgataggaacaccctgtctttcatcctggaggagtttaagagcgacgaggaagtgatccagtccttctgcaagtacaagacactgctgagaaacgagaacgtgctggagacagccgaggccctgtttaacgagctgaacagcatcgacctgacacacatcttcatcagccacaagaagctggagacaatcagcagcgccctgtgcgaccactgggatacactgaggaatgccctgtatgagcggagaatctccgagctgacaggcaagatcaccaagtctgccaaggagaaggtgcagcgcagcctgaagcacgaggatatcaacctgcaggagatcatctctgccgcaggcaaggagctgagcgaggccttcaagcagaaaaccagcgagatcctgtcccacgcacacgccgccctggatcagccactgcctacaaccctgaagaagcaggaggagaaggagatcctgaagtctcagctggacagcctgctgggcctgtaccacctgctggactggtttgccgtggatgagtccaacgaggtggaccccgagttctctgcccggctgaccggcatcaagctggagatggagccttctctgagcttctacaacaaggccagaaattatgccaccaagaagccctactccgtggagaagttcaagctgaactttcagatgcctacactggcctctggctgggacgtgaataaggagaagaacaatggcgccatcctgtttgtgaagaacggcctgtactatctgggcatcatgccaaagcagaagggcaggtataaggccctgagcttcgagcccacagagaaaaccagcgagggctttgataagatgtactatgactacttccctgatgccgccaagatgatcccaaagtgcagcacccagctgaaggccgtgacagcccactttcagacccacacaacccccatcctgctgtccaacaatttcatcgagcctctggagatcacaaaggagatctacgacctgaacaatcctgagaaggagccaaagaagtttcagacagcctacgccaagaaaaccggcgaccagaagggctacagagaggccctgtgcaagtggatcgacttcacaagggattttctgtccaagtataccaagacaacctctatcgatctgtctagcctgcggccatcctctcagtataaggacctgggcgagtactatgccgagctgaatcccctgctgtaccacatcagcttccagagaatcgccgagaaggagatcatggatgccgtggagacaggcaagctgtacctgttccagatctataacaaggactttgccaagggccaccacggcaagcctaatctgcacacactgtattggaccggcctgttttctccagagaacctggccaagacaagcatcaagctgaatggccaggccgagctgttctaccgccctaagtccaggatgaagaggatggcacaccggctgggagagaagatgctgaacaagaagctgaaggatcagaaaaccccaatccccgacaccctgtaccaggagctgtacgactatgtgaatcacagactgtcccacgacctgtctgatgaggccagggccctgctgcccaacgtgatcaccaaggaggtgtctcacgagatcatcaaggataggcgctttaccagcgacaagttctttttccacgtgcctatcacactgaactatcaggccgccaattccccatctaagttcaaccagagggtgaatgcctacctgaaggagcaccccgagacacctatcatcggcatcgatcggggcgagagaaacctgatctatatcacagtgatcgactccaccggcaagatcctggagcagcggagcctgaacaccatccagcagtttgattaccagaagaagctggacaacagggagaaggagagggtggcagcaaggcaggcctggtctgtggtgggcacaatcaaggatctgaagcagggctatctgagccaggtcatccacgagatcgtggacctgatgatccactaccaggccgtggtggtgctggagaacctgaatttcggctttaagagcaagaggaccggcatcgccgagaaggccgtgtaccagcagttcgagaagatgctgatcgataagctgaattgcctggtgctgaaggactatccagcagagaaagtgggaggcgtgctgaacccataccagctgacagaccagttcacctcctttgccaagatgggcacccagtctggcttcctgttttacgtgcctgccccatatacatctaagatcgatcccctgaccggcttcgtggaccccttcgtgtggaaaaccatcaagaatcacgagagccgcaagcacttcctggagggcttcgactttctgcactacgacgtgaaaaccggcgacttcatcctgcactttaagatgaacagaaatctgtccttccagaggggcctgcccggctttatgcctgcatgggatatcgtgttcgagaagaacgagacacagtttgacgccaagggcacccctttcatcgccggcaagagaatcgtgccagtgatcgagaatcacagattcaccggcagataccgggacctgtatcctgccaacgagctgatcgccctgctggaggagaagggcatcgtgttcagggatggctccaacatcctgccaaagctgctggagaatgacgattctcacgccatcgacaccatggtggccctgatccgcagcgtgctgcagatgcggaactccaatgccgccacaggcgaggactatatcaacagccccgtgcgcgatctgaatggcgtgtgcttcgactcccggtttcagaacccagagtggcccatggacgccgatgccaatggcgcctaccacatcgccctgaagggccagctgctgctgaatcacctgaaggagagcaaggatctgaagctgcagaacggcatctccaatcaggactggctggcctacatccaggagctgcgcaactaagaattcaataaaagatctttattttcattagatctgtgtgttggttttttgtgtgcggccgcaggaacccctagtgatggagttggccactccctctctgcgcgctcgctcgctcactgaggccgggcgaccaaaggtcgcccgacgcccgggctttgcccgggcggcctcagtgagcgagcgagcgcgcagctgcctgcaggggcgcctgatgcggtattttctccttacgcatctgtgcggtatttcacaccgcatacgtcaaagcaaccatagtacgcgccctgtagcggcgcattaagcgcggcgggtgtggtggttacgcgcagcgtgaccgctacacttgccagcgccctagcgcccgctcctttcgctttcttcccttcctttctcgccacgttcgccggctttccccgtcaagctctaaatcgggggctccctttagggttccgatttagtgctttacggcacctcgaccccaaaaaacttgatttgggtgatggttcacgtagtgggccatcgccctgatagacggtttttcgccctttgacgttggagtccacgttctttaatagtggactcttgttccaaactggaacaacactcaaccctatctcgggctattcttttgatttataagggattttgccgatttcggcctattggttaaaaaatgagctgatttaacaaaaatttaacgcgaattttaacaaaatattaacgtttacaattttatggtgcactctcagtacaatctgctctgatgccgcatagttaagccagccccgacacccgccaacacccgctgacgcgccctgacgggcttgtctgctcccggcatccgcttacagacaagctgtgaccgtctccgggagctgcatgtgtcagaggttttcaccgtcatcaccgaaacgcgcgagacgaaagggcctcgtgatacgcctatttttataggttaatgtcatgataataatggtttcttagacgtcaggtggcacttttcggggaaatgtgcgcggaacccctatttgtttatttttctaaatacattcaaatatgtatccgctcatgagacaataaccctgataaatgcttcaataatattgaaaaaggaagagtatgagtattcaacatttccgtgtcgcccttattcccttttttgcggcattttgccttcctgtttttgctcacccagaaacgctggtgaaagtaaaagatgctgaagatcagttgggtgcacgagtgggttacatcgaactggatctcaacagcggtaagatccttgagagttttcgccccgaagaacgttttccaatgatgagcacttttaaagttctgctatgtggcgcggtattatcccgtattgacgccgggcaagagcaactcggtcgccgcatacactattctcagaatgacttggttgagtactcaccagtcacagaaaagcatcttacggatggcatgacagtaagagaattatgcagtgctgccataaccatgagtgataacactgcggccaacttacttctgacaacgatcggaggaccgaaggagctaaccgcttttttgcacaacatgggggatcatgtaactcgccttgatcgttgggaaccggagctgaatgaagccataccaaacgacgagcgtgacaccacgatgcctgtagcaatggcaacaacgttgcgcaaactattaactggcgaactacttactctagcttcccggcaacaattaatagactggatggaggcggataaagttgcaggaccacttctgcgctcggcccttccggctggctggtttattgctgataaatctggagccggtgagcgtggaagccgcggtatcattgcagcactggggccagatggtaagccctcccgtatcgtagttatctacacgacggggagtcaggcaactatggatgaacgaaatagacagatcgctgagataggtgcctcactgattaagcattggtaactgtcagaccaagtttactcatatatactttagattgatttaaaacttcatttttaatttaaaaggatctaggtgaagatcctttttgataatctcatgaccaaaatcccttaacgtgagttttcgttccactgagcgtcagaccccgtagaaaagatcaaaggatcttcttgagatcctttttttctgcgcgtaatctgctgcttgcaaacaaaaaaaccaccgctaccagcggtggtttgtttgccggatcaagagctaccaactctttttccgaaggtaactggcttcagcagagcgcagataccaaatactgtccttctagtgtagccgtagttaggccaccacttcaagaactctgtagcaccgcctacatacctcgctctgctaatcctgttaccagtggctgctgccagtggcgataagtcgtgtcttaccgggttggactcaagacgatagttaccggataaggcgcagcggtcgggctgaacggggggttcgtgcacacagcccagcttggagcgaacgacctacaccgaactgagatacctacagcgtgagctatgagaaagcgccacgcttcccgaagggagaaaggcggacaggtatccggtaagcggcagggtcggaacaggagagcgcacgagggagcttccagggggaaacgcctggtatctttatagtcctgtcgggtttcgccacctctgacttgagcgtcgatttttgtgatgctcgtcaggggggcggagcctatggaaaaacgccagcaacgcggcctttttacggttcctggccttttgctggccttttgctcacatgt

SEQ ID NO: 53412 - DNA, 5247 bp, Artificial Sequence
  Synthetic: AAV1: Cas12a sgRNA (SapI)_hSyn_mCh-KASH
cctgcaggcagctgcgcgctcgctcgctcactgaggccgcccgggcaaagcccgggcgtcgggcgacctttggtcgcccggcctcagtgagcgagcgagcgcgcagagagggagtggccaactccatcactaggggttcctgcggccgcacgcgtgagggcctatttcccatgattccttcatatttgcatatacgatacaaggctgttagagagataattggaattaatttgactgtaaacacaaagatattagtacaaaatacgtgacgtagaaagtaataatttcttgggtagtttgcagttttaaaattatgttttaaaatggactatcatatgcttaccgtaacttgaaagtatttcgatttcttggctttatatatcttgtggaaaggacgaaacaccgtaatttctactcttgtagatgaagagcgagctcttctttttttctagactgcagagggccctgcgtatgagtgcaagtgggttttaggaccaggatgaggcggggtgggggtgcctacctgacgaccgaccccgacccactggacaagcacccaacccccattccccaaattgcgcatcccctatcagagagggggaggggaaacaggatgcggcgaggcgcgtgcgcactgccagcttcagcaccgcggacagtgccttcgcccccgcctggcggcgcgcgccaccgccgcctcagcactgaaggcgcgctgacgtcactcgccggtcccccgcaaactccccttcccggccaccttggtcgcgtccgcgccgccgccggcccagccggaccgcaccacgcgaggcgcgagataggggggcacgggcgcgaccatctgcgctgcggcgccggcgactcagcgctgcctcagtctgcggtgggcagcggaggagtcgtgtcgtgcctgagagcgcagtcgagaaggtaccggatccggccgctcgagtcgccaccatggtgagcaagggcgaggaggataacatggccatcatcaaggagttcatgcgcttcaaggtgcacatggagggctccgtgaacggccacgagttcgagatcgagggcgagggcgagggccgcccctacgagggcacccagaccgccaagctgaaggtgaccaagggtggccccctgcccttcgcctgggacatcctgtcccctcagttcatgtacggctccaaggcctacgtgaagcaccccgccgacatccccgactacttgaagctgtccttccccgagggcttcaagtgggagcgcgtgatgaacttcgaggacggcggcgtggtgaccgtgacccaggactcctccctgcaggacggcgagttcatctacaaggtgaagctgcgcggcaccaacttcccctccgacggccccgtaatgcagaagaagaccatgggctgggaggcctcctccgagcggatgtaccccgaggacggcgccctgaagggcgagatcaagcagaggctgaagctgaaggacggcggccactacgacgctgaggtcaagaccacctacaaggccaagaagcccgtgcagctgcccggcgcctacaacgtcaacatcaagttggacatcacctcccacaacgaggactacaccatcgtggaacagtacgaacgcgccgagggccgccactccaccggcggcatggacgagctatacaagttgtacaagtccggactcagatctcgagaggaggaggaggagacagacagcaggatgccccacctcgacagccccggcagctcccagccgagacgctccttcctctcaagggtgatcagggcagcgctaccgttgcagctgcttctgctgctgctgctgctcctggcctgcctgctacctgcctctgaagatgactacagctgcacccaggccaacaactttgcccgatccttctaccccatgctgcggtacaccaacgggccacctcccacctaggaattcgatatcaagcttatcgataccgagcgctgctcgagagatctacgggtggcatccctgtgacccctccccagtgcctctcctggccctggaagttgccactccagtgcccaccagccttgtcctaataaaattaagttgcatcattttgtctgactaggtgtccttctataatattatggggtggaggggggtggtatggagcaaggggcaagttgggaagacaacctgtagggcctgcggggtctattgggaaccaagctggagtgcagtggcacaatcttggctcactgcaatctccgcctcctgggttcaagcgattctcctgcctcagcctcccgagttgttgggattccaggcatgcatgaccaggctcagctaatttttgtttttttggtagagacggggtttcaccatattggccaggctggtctccaactcctaatctcaggtgatctacccaccttggcctcccaaattgctgggattacaggcgtgaaccactgctcccttccctgtccttctgattttgtaggtaaccacgtgcggaccgagcggccgcaggaacccctagtgatggagttggccactccctctctgcgcgctcgctcgctcactgaggccgggcgaccaaaggtcgcccgacgcccgggctttgcccgggcggcctcagtgagcgagcgagcgcgcagctgcctgcaggggcgcctgatgcggtattttctccttacgcatctgtgcggtatttcacaccgcatacgtcaaagcaaccatagtacgcgccctgtagcggcgcattaagcgcggcgggtgtggtggttacgcgcagcgtgaccgctacacttgccagcgccctagcgcccgctcctttcgctttcttcccttcctttctcgccacgttcgccggctttccccgtcaagctctaaatcgggggctccctttagggttccgatttagtgctttacggcacctcgaccccaaaaaacttgatttgggtgatggttcacgtagtgggccatcgccctgatagacggtttttcgccctttgacgttggagtccacgttctttaatagtggactcttgttccaaactggaacaacactcaaccctatctcgggctattcttttgatttataagggattttgccgatttcggcctattggttaaaaaatgagctgatttaacaaaaatttaacgcgaattttaacaaaatattaacgtttacaattttatggtgcactctcagtacaatctgctctgatgccgcatagttaagccagccccgacacccgccaacacccgctgacgcgccctgacgggcttgtctgctcccggcatccgcttacagacaagctgtgaccgtctccgggagctgcatgtgtcagaggttttcaccgtcatcaccgaaacgcgcgagacgaaagggcctcgtgatacgcctatttttataggttaatgtcatgataataatggtttcttagacgtcaggtggcacttttcggggaaatgtgcgcggaacccctatttgtttatttttctaaatacattcaaatatgtatccgctcatgagacaataaccctgataaatgcttcaataatattgaaaaaggaagagtatgagtattcaacatttccgtgtcgcccttattcccttttttgcggcattttgccttcctgtttttgctcacccagaaacgctggtgaaagtaaaagatgctgaagatcagttgggtgcacgagtgggttacatcgaactggatctcaacagcggtaagatccttgagagttttcgccccgaagaacgttttccaatgatgagcacttttaaagttctgctatgtggcgcggtattatcccgtattgacgccgggcaagagcaactcggtcgccgcatacactattctcagaatgacttggttgagtactcaccagtcacagaaaagcatcttacggatggcatgacagtaagagaattatgcagtgctgccataaccatgagtgataacactgcggccaacttacttctgacaacgatcggaggaccgaaggagctaaccgcttttttgcacaacatgggggatcatgtaactcgccttgatcgttgggaaccggagctgaatgaagccataccaaacgacgagcgtgacaccacgatgcctgtagcaatggcaacaacgttgcgcaaactattaactggcgaactacttactctagcttcccggcaacaattaatagactggatggaggcggataaagttgcaggaccacttctgcgctcggcccttccggctggctggtttattgctgataaatctggagccggtgagcgtgggtctcgcggtatcattgcagcactggggccagatggtaagccctcccgtatcgtagttatctacacgacggggagtcaggcaactatggatgaacgaaatagacagatcgctgagataggtgcctcactgattaagcattggtaactgtcagaccaagtttactcatatatactttagattgatttaaaacttcatttttaatttaaaaggatctaggtgaagatcctttttgataatctcatgaccaaaatcccttaacgtgagttttcgttccactgagcgtcagaccccgtagaaaagatcaaaggatcttcttgagatcctttttttctgcgcgtaatctgctgcttgcaaacaaaaaaaccaccgctaccagcggtggtttgtttgccggatcaagagctaccaactctttttccgaaggtaactggcttcagcagagcgcagataccaaatactgtccttctagtgtagccgtagttaggccaccacttcaagaactctgtagcaccgcctacatacctcgctctgctaatcctgttaccagtggctgctgccagtggcgataagtcgtgtcttaccgggttggactcaagacgatagttaccggataaggcgcagcggtcgggctgaacggggggttcgtgcacacagcccagcttggagcgaacgacctacaccgaactgagatacctacagcgtgagctatgagaaagcgccacgcttcccgaagggagaaaggcggacaggtatccggtaagcggcagggtcggaacaggagagcgcacgagggagcttccagggggaaacgcctggtatctttatagtcctgtcgggtttcgccacctctgacttgagcgtcgatttttgtgatgctcgtcaggggggcggagcctatggaaaaacgccagcaacgcggcctttttacggttcctggccttttgctggccttttgctcacatgt

SEQ ID NO: 53413 - DNA, 127 bp, Artificial Sequence
  Synthetic: DMPK upstream hotspot_1
gtgggtctccgcccagctccagtcctgtgatccgggcccgccccctagcggccggggagggaggggccgggtccgcggccggcgaacggggctcgaagggtccttgtagccgggaatgctgctgctg

SEQ ID NO: 53414 - DNA, 91 bp, Artificial Sequence
  Synthetic: DMPK upstream hotspot_2
tgggtctccgcccagctccagtcctgtgatccgggcccgccccctagcggccggggagggaggggccgggtccgcggccggcgaacggggc

SEQ ID NO: 53415 - DNA, 82 bp, Artificial Sequence
  Synthetic: DMPK upstream hotspot_3
tgggtctccgcccagctccagtcctgtgatccgggcccgccccctagcggccggggagggaggggccgggtccgcggccggc

SEQ ID NO: 53416 - DNA, 154 bp, Artificial Sequence
  Synthetic: DMPK downstream hotspot_1
gatgggcaaactgcaggcctgggaaggcagcaagccgggccgtccgtgttccatcctccacgcacccccacctatcgttggttcgcaaagtgcaaagctttcttgtgcatgacgccctgctctggggagcgtctggcgcgatctctgcctgctt

SEQ ID NO: 53417 - DNA, 77 bp, Artificial Sequence
  Synthetic: DMPK downstream hotspot_2
ttggttcgcaaagtgcaaagctttcttgtgcatgacgccctgctctggggagcgtctggcgcgatctctgcctgctt
